United States Patent Application Publication US 2007/0067865 A1 - sequence listing, part 71

SEQ ID NO: 458166 - DNA, 496 bp, Sorghum bicolor
  unsure (1)..(496): unsure at all n locations
cgtccgctcaaagcgagctgtgggaatggagttcgaactatctcaacaacagagatcactctttctttatacagaaaatgcccttgtccgcgagtcaacacagcttcattctacttttgtgaagttgaaagaattgagagagaactgcaagacaaatcttgagacgatcagcaagtcttcaatgagaaaatgagtgctgcatgttgcgctgctgaactgttagttttcctgagacttagtatgatcagctggcttggtttgaagcaagatgtgcattgagatttttcctcaacttaggaattatgatgcttaccatcagtttggcactttggctgtagtgattactcctatcataaagcattgntctagtatgttttttttttttggataaagattctagtatgtttgtaggtgatgtaaaaataaccatggtaaggtaggaactgtaagacatcggcatcttgaccttgtcctttgagtgaggtttctttataag

SEQ ID NO: 458167 - DNA, 432 bp, Sorghum bicolor
cgtccgatttatttggtcacaattgcttattcatgttaccatctcttagagcatgactagttatacaaccactgctggctggatgtacatttacagccctagctggttgtaaacttacatatcacttctcttctctctcctacatctcaagcataaagtctacttacaaccctttattagagcctattgggttacaagggataattgttagccaggtaaaattattcccagcccatccaagcaggacagatgactaatatgtgggctaatttttagccaagccttcaactagttattacccaactagttggccaactgtagctaatttatgctaattttccagctaataactagccaagcccttatacttgttcttatttttctgacttgtgattagcagtgtcaaactatctaccacaagtatcatgtcac

SEQ ID NO: 458168 - DNA, 453 bp, Sorghum bicolor
acgcgtcacgcgagcggtgtattcgacgtggtactagatgattgggatgaggacgatgatgcacttgatgaagacggaacatcatgtcctgtgtgcaggagatgtgtgtgccgaacaacttgatggtctaatggtcgttgtgtgcaagatcctcatccgaaacgacgacgagcttcatgccatgcgattggaatacagacactctggaggctatattcaaataagatgtgattagggtgcacaaatgcacatgtgcacagtcaatcatgtagtatgcttcggctctgcctccaaagatgtgatgtaaggcctttgctttttttctatgaaatatttttattgacaagagcaaagaggatgatgcactagctagactgtctgcgctttcatatgttggatgctatctgttccagccaaggctcattttcgtgaattcagttgttgctgtacttc

SEQ ID NO: 458169 - DNA, 411 bp, Sorghum bicolor
cgtccggcacaacgtccagcatgttaatatgagccatatgccacatatgatgagcattgggggaccctattctagttatgttgttgctacagtcggacctggtggattgcctcaatcaacttatggtattgatatggtctatccaaatgccactgttaatccagcaagtgagagaagagatgttccgcctgaagtttatcacaaggaagcttacatgaagtcgtagctctccaacacagtcagttgccgcagcagattggaaaccatgctcaatgggataagactgcaatgacatgcctgcaccaagactaagggagaagcaaggacatagccaaggatccatcaacaactttgtgactgaagggcaactgatttcagtgagtgtcttcaaacagaatacaaggtgcttta

SEQ ID NO: 458170 - DNA, 507 bp, Sorghum bicolor
cgtccgacccaatcgaaggagcggcggcggcggcggcggcgaccggagaagatggtgcgcaaggcgaaggttgagttcgacgagcagccgccggataacttcgacccgaagaacccgtatggggacccggtggcgatgctggagtaccgggagcacctggtgcgggagaagtggatccagatcgagaccgccaagatcatccgggagcgcctccgctggtgctaccgcatcgagggcatcaaccaccaccagaagtgccgccacctcgtcgaccagtacctagagtctacccgcggcgtgggttggggcaaggatgctcgcccgcccgagttccacgagcccaagaagaccgtcgaggcggagtagcggcgctgctgcacggcttctcgtgctgctgttcctggatcggagaggtgatctgatccttccattgaatcgaaagaagtaacttggaactgttgcaatttgtcttttacatctgaagctgctgatagacttcaaataaaa

SEQ ID NO: 458171 - DNA, 441 bp, Sorghum bicolor
gacaacacccgcatctcctggacgccgtccccaacctttccgtcacgcgccgccgccgcccgtcactgtgctcgcgatcccgccggcggctccagaggacttgtcgcgtgctcggccatggcatcgccaccgccggccctcgagatcctagttcgcgagcccgacggctgcacggtgtggtctggcccgccatacccgccgggcaccaccactccgccgcagagactcccaaagacggcgtgcagcgccacctctttctccaccgacggtgcccgcctcctggcgactgtggcatcggcctcggccaccgtctacgactgccgcacactcgccgttgcaagtgcttcgagctcccgggtctcctcgccgccgcgctgtcgcccacgggggcgatctgcagaccttccagaagtatcctcgccgcaggagaagaatgtcacg

SEQ ID NO: 458172 - DNA, 454 bp, Sorghum bicolor
cgtccggtccccgtccccgcgtcgccgcttcccccctcccttcccttccctccgtcctcggcgaatcgaagccgctagcccccgacatccatggctgccgcgttaacccgcctccgatccgccgtcgagcggctcgggccctcccgcgcccgcgtccgcgccttctccgcagccgctgctgaggccgaggcggccagcgactctagggctttcaccgcagccgcggtggccgccggctcggggctggggatctggctgctgtcctcgaacccgcagccgctcgcggactccggcctggcggaggatgccgccaccgcaggcggcggaggcaatagcggcttccccgcagcttttcggcgtgtcggagccaccggggagcgggaggccagattcctcttcggagattcatatcgccgaagggtgtcttcaagtatgagaaaaggattaggacgcg

SEQ ID NO: 458173 - DNA, 321 bp, Sorghum bicolor
cgtccgggccgtggcaggggccgtggagaccgtggaggtttcagagggggatatggtgggggttatcatgccccaccagctgctcctgcaattcaagaccaatcccagttcccttcgcttggtgggaagtgaaacatctggtacctgaaaatccatatcgtctttgctgtcaaagtcgggttctgctttgcagattactgcgtcactgctaatcagacataatggtgtcgcatgttgtttattccctgctgtgagtcgactttgtatatcagaggtgtcttgcaaaatttttgtaggctatttggcgttttaattgaaaac

SEQ ID NO: 458174 - DNA, 504 bp, Sorghum bicolor
cgtccggcagggtcttgcaatgttttcaggtcgtccgattaatcgcgattaatcgtcctggtcggtcaggagtgctcgattaggaggttcgacccgaccaggtcgaccagaaacctggtcgtccgattagtcgtccacttatcgcgattaatcgtccgattaggacatggacgaccagggatggtgaaatgtttcaacttgaatctttgttattgccatttggagcgaaggtcttagactttaaagacaactatctcaggatgttcatgaaggcaccagactgtgaaatttatggacagaaatttaattgtcctattgattcgtttatttcagaccatgagctactgatagaaattgataaaagaaatatggaaccaaagaaagtacagatcattcctgatgacatgtctgtagatatactggttgagaggatgagtcctccagagaggccatttcttgtggaaccttacaatggcttattcagcaatgtcaacaccaggctat

SEQ ID NO: 458175 - DNA, 494 bp, Sorghum bicolor
cgtccgcccacgcgtccgcccatctcccactctgagctgcaccctatctcccggtcctagcactctagcagtgagggaggagagcatggtggccatggttggcagcgcatcgagtagagtggccggcctccttagcgatggtggcgtgaagggtcggcggctcggctagggcggcgcgagggttcaccattccaagcctcgtccacaccatctatgatgacaggatgatgcttgtagcgctgacggctccctcagtgatggttttgcaggttctggaagacggatccggctgtggtgaggtggcaccggcgagcacagcccagatccacacgagagaaggccggacctgcgctaggaagtttccaactcggctccttcatccttaaggccatcaccatcaatggctctggcaagatccatggcgcattcatggctttgagggcccagtgttgcaggttgcgggcgtgtggatgctgccccagtggacgtgaaga

SEQ ID NO: 458176 - DNA, 501 bp, Sorghum bicolor
cgtccggataaatgggagaactcattgctatctagctttgctgagaattgtaacagtggttttggaagaaaccgtatcacctacacagacacgtgtactgtaagtggtcaagatgtgaagaaatatacaagcatggatgctattgatgacttggtacggtatggcgtagggtcaaggagaattaacccaagtgaacagactgatataattgttttctgtagcggtgggttcgagaattttttcactccgaaatcagaaggagagttgctttcccagcttgttctcttgctggagcagtctggggctaaatacacgattctttatgcttcccaaccatctggtttactggagaacccttccagcttgccactaggtaggtatcttgcagagaagactaagggtacaaaaactggcgagggcaaatgtgatggagagtgcctagtcaaatcaactcttcttggagggaactttgttggaatagtgcttcttatcatcctgata

SEQ ID NO: 458177 - DNA, 497 bp, Sorghum bicolor
cgtccgatctattgtattatcacatcaccatggaacaacgtccatgtgttgccctggtcaactagggactcagtgccttgatagatggtgtctcagttgccaatcaccatagcagcagcacatcacaggaaagaattgattgaactgcaattctgcattagtcaaaggtgtgtttcatattctgatggagcaaagagtcaaatttagaaaagtagaggtagcaagcctaatgatgttgtgacattgctatattatatcaggtgcgtttcatgttctgaactgcattgcgtgctttcctttgtgtttttttggtaattgtgatttgctttgattattataaagttagtcaatccagtaaacgagtcctattaatggctttgtgatggaccaatacaagttggtaacaaaccttagaatatactcagcacaccagcaaggactcaacaactgattactaaaccaatgatgctttgacattggtcacttagatatttgtc

SEQ ID NO: 458178 - DNA, 502 bp, Sorghum bicolor
cgtccgctttgctgttgtcgaagtcggtggcttccatgatgttaatgttggaactttccatcgtaagctgaaatctgtgccccatggtgaggcatgtgtagttggacgtgatgtctctggtgacctaacggccaagagtgtggaattgggtggtgatttaagggtacataaggatgataaagatcttgacagtaaaacctcaaaggcttgggaaggtgcaacgattttttcttttgatggggagttgttggcatgaacctttttttggttacggaaagagcagttttcctaccatggggcacaattttgaagtgtctggagcgttactggacattctgggaaaaggagagaggtcttgcacggtcaacaagtttggttcacgggtttggagcacctgtagatggtaaatctaacagccacccagaaggatacagggattgtctcaaccaggaacacttagatatagatgactcggttaccctaagttaccatcaaccatgtt

SEQ ID NO: 458179 - DNA, 493 bp, Sorghum bicolor
  unsure (1)..(493): unsure at all n locations
cgtccgggtcggnggacgaatcgaaacccttcgttcctctcctattcgaaggccatggcggacacggcctcgtcctcatcagcagcgggaccctcgccggtagacgcggcctctctcgccgcggtggcggaggcggcgccgccggaggagatgacgctggtggtgaagtggcgcgggcaggagcagacggtgcggatggtgggggacgatacgctgggtgagctcaaactgcgcatctgcgaggtcaccggggtgctccccaagcgtcagacgctgctctaccccaagctcatactcaaggacatcgacgactccaccctcctctcctccatcccattcaagcccaacgggaagatcagcatgatcggtactattgaagaagaaatatttgtcggacaagaagatgatccggagttacttgatgattttgactttgagcagaatgaagctacagccattaaggataaagatgtctacaagcaaaaattaaagc

SEQ ID NO: 458180 - DNA, 134 bp, Sorghum bicolor
cgtccggagaagttggccgagattgctctgcacttggagattcccagtactaagaccctgtgtctggatgttacaacccagtggaacaccacttatctgatgttgttagctgccttggattataagcagacttt

SEQ ID NO: 458181 - DNA, 414 bp, Sorghum bicolor
  unsure (1)..(414): unsure at all n locations
cgtccggcacgacgaagacatcaatcacgcgctctccgaggccactgccaacggcacgtagggggctggcggcatctgcttttcgccgggagctttgtccttggcgctcggaggagaatcctcgcgggtgccgagaaaaactgcccggtttcggccggccgcctgttgtcctgaagccgtccgagattccagcaatccagccgcagcattcacatgcatcttcctgaaccgccgttgcgttgcgctgcgcaagaatcagaatctcgtggcgttcctcggtacagttttgcatcatacctcattgcaatgacatttctcaggatggcacagggggaaaaaatgatcttgttgtacatattgatccgctaaaacatgcgtgcattcgccgcggccttccaaaanaaaaaaaattta

SEQ ID NO: 458182 - DNA, 295 bp, Sorghum bicolor
  unsure (1)..(295): unsure at all n locations
cgtccgcccacgcgtccgggaagctaggggccaagatggagctaggagggtcaaggaccatcatgctagcgccggcgctgcccatctaggagagcgtggctcgccgcaacgtcaatggatgggcgacctaacggccaagactgacctatcggccactcttctaaacgcccctaagcttcatgtactttttctcagggaaacctccatctctctcgatccttcaaccttgatggttctctgaacgttgatgtgaacgagtntaccttttttttggttactcgtttgagcaggtttc

SEQ ID NO: 458183 - DNA, 186 bp, Sorghum bicolor
cgtccgtacatgtacaatagttcattgtgctgttttgtatgtatattggtatcagctctcaagtgtaatgctaacagggcaagaattgttggacggacttgccctttcatagcggtacagacatcgatagattcatttctatttctaattcaataaactagcactatgccgagtctattttatgcc

SEQ ID NO: 458184 - DNA, 489 bp, Sorghum bicolor
cgtccgattaccagacatctttggcagcgcccctgattctttcatccatggtagtgttactgaccaaggaactgtcaatgatttgatggctggtttgaaccttaatggaacaggccaggctcagtctgcagttaaagcagagcccagtagcaacttcagtggttcacagttctttgatacaaacaacgagaccagccatgtggcaagtgctgcagcattgaatggcattcttggtcaaaattcattttaccaacagcagcagactcccttgcagtacaacttccctcaacatatgatgatcaatcaatcatttcctgggcaacaattaaactatggtgccatggggattcttcttgctcagcagcagcagttactgcaaaatcttggaaatttcaatgctggacttgggaattcttctttcaattcgatgcacagtggaaatgcatctgtgcttccagatattttcaattcaagtaatcaacctcaaaa

SEQ ID NO: 458185 - DNA, 131 bp, Sorghum bicolor
gggaaggtttttggtcggctgcggccgtttgccgtttttttgatccatcacaaaaaagaaaaccaggggctaaacaggaagagctcgggtcaacaagtctttccggtgggaatgctgtgtcaaattgattt

SEQ ID NO: 458186 - DNA, 192 bp, Sorghum bicolor
  unsure (1)..(192): unsure at all n locations
gtccgaaggtgtctggatctaatgggatttcggctgagagatagatcaaagtgaaataaggatctatgaaatcaaaagcaaagcttaagggngctttctcttttattggactaaacaatgacaccttcaaagtaaatgtaagcttcatcatgtttaagatctcgactccaaaagtataattgaggactgtct

SEQ ID NO: 458187 - DNA, 162 bp, Sorghum bicolor
ccgcggacgcgtgggcggacgctgggcggatcgtaatttagtcagttccagacgccatccgccagtgctcggcgagcggttgcttaataatatactcactctatatggctatcaataaaggcggctcgacaatctaatatctgaatcaaatcctcaggcgat

SEQ ID NO: 458188 - DNA, 474 bp, Sorghum bicolor
cgtccgccgagatgcttttccggtgccaggcctgccagaggacatctgaactgtttggatgggttagggatgtctttcagcaatgtgcacctggttgggatagggatgccttgctgcgcgagctcgactatgtttgcaagatattccgtctaagtgaggactcaaaggggaggaaattattcagaaaatgtgctgaactagttgaaagattgaggagtggttctgctgaatcaacgactcctagaattctgctacaagcactgcaagagctggatattgatacctccaagagctttgagaacgaagagccagggcgcctgatcactccccaagaggcctgcaaccggatcgccgaggtggtccaagaagccgtcagaaagatggagattgtagcagaggagaaactgcgactgtacaaatgcgcccacccttgcggggaagcctgcgaacgtgagctggaggagaaggcgcggg

SEQ ID NO: 458189 - DNA, 509 bp, Sorghum bicolor
cgtccggccaaaaaagatgtgatgaagcaaggatgaatgctctgtcagaagaaattgacctactcaatgccaagattgacaagctatccagtgagagaaacgagctcttcgaaaagaatgagcagaaagataaggagttagctggaattagtgaaaaggacatgcaattgcaagacaaaactgctgagattacttcactaaataaagagcttgtatccctcaaggaccaagtgaagatgcatttggacgaactacacaatttaaaacgtttgaagaacgagaaggaggagacaattggaaagctgcaaatagatattgggtcactgaaactccagtgcgacaacttgaagactttgctgtccaagaaggagtctgagaaagacaaccttgcttctcaggtgctgaaactgagaagatcccttgaaacccgggaaggggcaaaggcaaatggtcaaaattcagatgcgaaggacaatcagcacactaataataagcgcaccaaacacaat

SEQ ID NO: 458190 - DNA, 497 bp, Sorghum bicolor
cgtccgactaaatatggtggatgtggaaccctcaaaagtagtcagtatatgcggaggacttgtgacaaaagagctgatggttgtcgcaactccttggaattggcattgccatctagaagtgctcaggtttacaagttggtgcgaattttgaggatttagcatgtcaaaatataagtattgtaatgaaaccatggaactgcgtagagtatggggctttgcagtccttttggcatttggtgataagatggcaaaacagagggattgtagcaaccttgcaggtatagcttcaggacatctgttgacattgaggacccttcagttttgccctctggtgcagtgcaagttctctaaaatttgtacatgttgtgacagttatgactactgaggctcattagcttggaactgacttgaaggaggagctcagcaaggtttgatgaccaacaggacagtggagaaggagcatccacatgcgctcctcattttgacaaattgcttca

SEQ ID NO: 458191 - DNA, 504 bp, Sorghum bicolor
cgtccggtgccagatctggctattgttgctgagagctccttgatgtcattattgagatggagttacaagacaggcatggataaatcagcgagctcctcaaatggacaaataactttggtaaatggatctgaatttgcaattatctctcttatggcctcagagaatgacttcaggattccagaatctctgccatgccttcatgacaaagtacttgcagctgctgctgaagcagctattagtttctcaactgatcagagaagaaagcagaatcctgcagcagggattattggtggcttcattaaaggaatgaaaggcaaggctgaagaaaatgcaaaaatgagagaaagtttgactatggaaactccaagccaacagttggagtcaattttcttgaaagaaccatttgctgaactttcaatacccgatcttgatgatccgatagaagaattgcaatcgatgacatcgagatgacgatgagacccataccccggaccagcagcatct

SEQ ID NO: 458192 - DNA, 100 bp, Sorghum bicolor
gcgtcgggcctgccgttcactcacacgcgccgtttccccttgggcactttcgccgccgccgccgccatggcgctagcagcactcctgctctggctccttt

SEQ ID NO: 458193 - DNA, 317 bp, Sorghum bicolor
cgtccggcaagactaaagaacacattcgtgattctcacgataggtttctaccatgcatagagtattagtattctaggatcggatgaggttgtagagaagggcgtggactactgattagtatgtcaaatgatttgataattagatttgtgttgtgttagagcaattctacctatcaatgttccagggaaggtttcatggtgaattgtacatgcccctgaaacaattttgattgcttaaactctagaatgcttgtgttttcttatacgctggagtgtcgtgggatataaatttgcactgtcggttcagattaaagaaaa

SEQ ID NO: 458194 - DNA, 73 bp, Sorghum bicolor
cgtccggtggagcggccccgagctgcccagcccttgtactcagctctagatgatctgttctccaaaatggtta

SEQ ID NO: 458195 - DNA, 609 bp, Sorghum bicolor
  unsure (1)..(609): unsure at all n locations
tgcgtccgcagccgcgtgtccgccgggctgtcggtcaccgagctcgccaaatctttccacggctcgaggccgcccatgttcgtctgcaggtcactcctcgcaagggatcagtttgtcgaaataaggtggcctcatttgtgatggaagggccacaaggatcaagcaatgtgacaaaacacaataaaagaaagtctcctgtgcagagatggaggccggtttcaacagaagcagttccccagaaagatgacattaccgagacatcaaattctggaagcaagaaaattatagaggattgcatagcttctagtgagagtttggcatcagatggaacaaccaatgttgttgaagttaccaccaacgatgcttcatcgtcaaaatataacttaagtttggaatacagttcaactaaagtagttatagaagacaatgntggaggtatttggcttaataaggatctagttgtatccaatgtctccgggacgtattcctcctctattgaggtagatactcctttgatccgctntgtgaaaggaagggtgggtctacgcagaagcagattgaagaggatactggagttaaaattatcttcccatcatcaagagaggggac

SEQ ID NO: 458196 - DNA, 209 bp, Sorghum bicolor
cgtccggtcactttcttaagtacacattggcgctggacatgtaccttatttgtatccgtgacaacaactatgtgtctgctcttttttattttcctgcctttacttcaaaaatggctctgaactttgcgagcttgtagccaaatatatgtgtatgtgcttgagtctatatagttcatcctaagctgcaatgtgatagtctttgtaggccc

SEQ ID NO: 458197 - DNA, 554 bp, Sorghum bicolor
cgcgtccgtctagagccgaccccccacacattcatttcgctccccagccgtacgaactcgcagatcggagaaaccgaggcgcccgcggctttgctttccttccttccctgccccgttgacgagagaagtttctggagtgttcgagtcgagcagggttccgatggcgctgcagtggatgatcctggcttgcgtggtggcggtggaggcggcggtggctgcgctggtcacgctcccggtgccccgcgccgtgcggggccagatcgtcgcgctcacgtccttgttcctgcagcccctctccaccgtgatacccttcgccgccttccagctcctcgatatctactggaagaaggagcacaggctgatgtgcaccgcggagatttgcactgccgaagagcgcattcgcttcgagaaatctatgtttaaagctcagaggaatgtcatcctttgtgtttcagcatgcctactttactggtgcatttatcgcatagtaaaattcaacaaggatattaaggcattggaagagaccgagaagcgcctcaggcagagtagatcta

SEQ ID NO: 458198 - DNA, 408 bp, Sorghum bicolor
  unsure (1)..(408): unsure at all n locations
tttgggggcggagaaaaaaaaaaaaaaaaaacaacccccccccccccccccccccctcccccccccaccacaaaaaaananngtggttaataatggagggggggcgcgccccccccccccccccctcctccacaaaaaaaaaggggggaggggggggggggggggggggcccccaaaaaaaaaaaaaaaaaaaaaaaaaaaaaaaaaaaaacaaaaaaantcccctttttttttttttttttttttttttttttttttttttttttccccncccccccnnnnaaaancccccccnnnnaaaaaaaaaaagagggggggggggttggttgttggggggggnngtttttcccccccccaaccacccaccaaaacaaaaaaaaaaagggggaagggggggggggggggggg

SEQ ID NO: 458199 - DNA, 300 bp, Sorghum bicolor
  unsure (1)..(300): unsure at all n locations
gggggggttttttttaaaatatttttttagggggtgttttttcccccccccgcgggggggggggggggccctctttttttttttttggggggggggcttttttttttataaaaaaaaaaaaaggggggggggggggtggtgtttacaaaacaccccctttttttttttttttttctcccccccccggggggggtgggggggaacaaacctcttttttatttttgggggccgcccaaaaagagaagncccccaaaaaaaaaaaaaaaaaaaaaattttttttttttctttccccccccccc

SEQ ID NO: 458200 - DNA, 432 bp, Sorghum bicolor
ccacgcgtccgaaaaaaaaaaaaaaaaaaaaaaaaaaaaaaaaaaaaaaaaaaaaaaaaaaaaaaaaaaaaaaggagaaaaataaaaaaaaggcgccgacgttttaaggggcccaaagtttaaacttcaacagttcttctggtggtataaccttttattttgttggctcgcgccgttcttttacatgggcaggggttttaaaaccttctggccttggacaactcttggggtttcgcagcttaacccgtttgcggcagctgccctttttgcgaggtggcctcattccggacgttgtccccactggtttggcctttcttaatggtgggtggcccgcgtggtgtaggggttctttccttgtggggggcgttaatcctccccgttttggggctttccctcttgggggccttttccctgcccctggtcttggtttcc

SEQ ID NO: 458201 - DNA, 499 bp, Sorghum bicolor
  unsure (1)..(499): unsure at all n locations
cccccccctttggggggggtcgtgtatttatttattaagaggggttttttttttcccaaaaaaaaaaaggaggggggggggannnnacccccccccccccccccccccctttttttttgtccccccaccaccaccccccgggggggggggggcccccccccccccctttctttttttttttttttgggagagggggggggggggggggggcccccccccccccccccccccggggggggggggggccccccaccaccccccccccccccccccactattttttttttnnnncaccctaaaaaaaaaagagaagaaaaaaacccctttttttttttttttttttttttagaccccccgccccccccctttttttttttttttttttttttttttttgataaaaaaaaaaaaaaaaaaaaaaaaagggggggnnnnncccaggggggagaaaaaaaaaaaaaantttaatttttttttcccccccgccccccccccccccc

SEQ ID NO: 458202 - DNA, 472 bp, Sorghum bicolor
  unsure (1)..(472): unsure at all n locations
ggggggggcccccttttaaaacttttaaaaaacccccttcttttttttgaaaaaaaatttggggaagaaaaagggggggggggctccctcctttttttttttttgtgggggggtttttttttttttttnttaaaggggtttttgtttttttttaaaaaaaaaaaattttttttttaaaaaaaaaaaaaaaggcccgcggtcttttttttttttttccccccccccaccactatttttttttttttttttttttttgngggggccgccttttttttttttttttttttttcctcccccccggggggggggggggggcgacccccccacaaaaagaaaaaaaaatttttttgttttttttttctttccaccccaccccgcggggggggggggtgnccctccctctcccctctactgggaggggggcggggggcgccctctttcttttttttttttttttggggggggggggggg

SEQ ID NO: 458203 - DNA, 569 bp, Sorghum bicolor
cgttccgaaaaaaaaaaaaaaaaaaaaaaaaaaaaaaaaaaaaaaaaaaaaaaaaaaaaaaaaaaaaaaaaaaaaaaaaaaaaaaaaaaaaaaaaaaaaaaaaaaaaaaaaaaaaaaaaaaaaaaaaaaaaaaaaaaaaaaaaaaaaaaaaaaaaagggggcgccccttttaagggtcccaactttccttcccctgctttccaccatattattttttttttggggcccccaaatttaatttccttgcccgtgttttaaaacccccttacttggaaaacccttggttttcccaattttattccttttgaaaaatttccctttttccccggttggtttattacaaaaagggcccccccaattcccctttccaaaaatttgcccaccttaattggaaattggacccccccttttatgggccttttaaccccgggggttttggggtttccccccagggggccctttccttttgcgaggcccttagcccccgttctttagattttttcccttttttttctccccattttggcggtttttcccggaaaagttttaattggggggttccttttggg

SEQ ID NO: 458204 - DNA, 337 bp, Sorghum bicolor
  unsure (1)..(337): unsure at all n locations
aaaaaaaaaaaaatttttttttttttggggggcgcgccttcttttgaaaaaaaacacccccccctttttttttttgaagaagaaagagagggggggggggccccccccccccgggaaaaaaaaaaattttttttttttttttggggggggggggaaaaaaaacacccccccccccccccccttctttttttatataaaaaaaaacgcccgcgccgccccgttttttttttttttaaaaaaaaaaaaaanngagaggggggggggggggggggggggccctcctcttttttttttgttttttaaacaaaaaaaccaaaatttctttctttttttttat

SEQ ID NO: 458205 - DNA, 536 bp, Sorghum bicolor
cgtccggagtgagctgcggcgccggctggcgggggagctggaccaggtccgcgtgctctccaagcggctgaaggaggctgccgaggccctggcgcagcgggaggcttctgagcccgcgcctttgcccttgatggtgctgccaacacaacagcaggtggtggaggctggttatgtgcagccacatttctcagctggtgatatggcagtgcccatgtctgctcaggttgcagctgccgttactcctggccgcacgctgctgcagcgcagaccactaaccgtatccgttattcataatgaagcctttgaaaaggagaaacggacgccaaaggccaatcaattgtaccaaaattcggagttcttgcttgccaaggataggattcctcccgcagattcacatgggcgcaagaaatccaagcaccacaagaagaagcataggtcactagaatctcgtggcgcagactttgatgctgagcggcggctctactctcatgcgttcaagaagtcctcatcacttctgagccgcctaatgaagcaca

SEQ ID NO: 458206 - DNA, 421 bp, Sorghum bicolor
  unsure (1)..(421): unsure at all n locations
gtcccagtggtgtgcccaagcagcagcagcatcagcagcagcaggatctcctcccccgtcgtcttcctcctcctctgtcagggtcagggtccaggtcgggcttcctcccggccgccgcgcccaatcccgtctcgttcttccgcctcgctgcgcattcctcagcaggtcagggaatggcccagggcaattcacaatgtcgcaggtgaaaaggcctttggtgcccaacatgtcaaatggacctcttcgatgctcagctcaactcctttgggaatgggccaagtcgatggcctgcgggagcaacgtgaagaaaagtgggcttgcagagaagattgaattggttatttcttcccctttactgaggaatatgcaaactgcagntggggtctttggtggtgaaaagatactgatggtgtaaagcacc

SEQ ID NO: 458207 - DNA, 377 bp, Sorghum bicolor
ggaataaatcttcatcgagcagcaggaagcgagatcgagggatttaattttgtcttttttttgtcttctcttcctttccggcgacggcaggtgaatcactggccgggcggtgccggccaaggctagggttccggggatcgcgggcgccgggctcgactttcgtagcctaagccgccggctgccggcgcgcgggaaccggatgctatgctgctgagctgcgggtcgctctcctcctgggtgcgccgcttcgtcgcctgcgttggaggttgttttggttgggcccagcctactccgataatagctgttgatgagcctgcaaaaggtttaagaattcaagggcgttcagtaaaaaggcacaatttatctgacgacttttg

SEQ ID NO: 458208 - DNA, 471 bp, Sorghum bicolor
tgcgtccgcggacgcgtgggccggccctcgaaaaagctcaagaattcgaggactcttcctcctcttgctgcttcccctcctccacgatgcccatgccaagatccttccccaaatcctagcacatgcgcagcaatttgttttttgccccaaaaggaaggatttcatttcattccattccatggtttggatttgccatcaaccaaaggcaaagcttcttcctgtgatcttcttgtacctcggcgagctgtgtggctgattagttgatccaggctgtatatctgtctgggtctctgggataataatgagcggtggcaattcttcgtggctgatgccgccgtcgccgccggcgcccgcggcgtcggcgctcgacaacgtggagaccaagataagccccagcatcgtcctcatcgtggcgatcctggcgatcgtcttcttcgtctgcggcctgctgcacctgctggtgcgccacct

SEQ ID NO: 458209 - DNA, 411 bp, Sorghum bicolor
cgtccgcccatgtcggtcccagccaccctcgcgccggcggcgccgccaaaggcgtcgccgacagccagaagctcggcacgacgggcgccggcggctgacgcagcgtccgtggccgcctcttccgtcgccggctcggccgcgttgctgacactgacgccggccgcgcccgccgcggccttgtgagggaggacgtctccggctcgcttatcaaggtggtggacacggtggacgacgtcatcgtcgtcggcggcaaggccgctgagcaggtggcggccgagctcaaggcgctagacgaggccgtccagccggcgtttcctgatctgaagagcgccagggacgaggccctcaagctggaggagcgcgttgtgtacagcgcctacaagcaggtcacggaggcactccagggcgccg

SEQ ID NO: 458210 - DNA, 442 bp, Sorghum bicolor
cgtccgtaaagaaggcgcgattctcagtgttgtaaattgttcatcagacagctttagcccaactgttcttttcagcactgaacattgtggcatccataaatgggatacaagaaccaactcagaatcttggtcatttaaatcctctccggaggagggctatatatcagcacttgttgtgggccagtgcggaaattggttcatctcaggttcttcaagaggcgtccttacattgtgggacaataggtttttactgcctgttaactcatggaactattcaacagtaagccctatagagaaattatgcttgcttatacctccaccaagttcaatatcttctgctggaaggccattagtttttgttgccgccggatgcaacgaagtttctctgtggaatgctgagaaatgaagttgccaccagatgtttagaacagcgagcactgac

SEQ ID NO: 458211 - DNA, 390 bp, Sorghum bicolor
cgtccgcgctcccccaaatgccgcctcctcatcactaatcaccattgccccgcgcccacctcccactcgctctctactgcctctcgccgtcgccacggttcgcgatgggctgcttccttggctgcttcgggggggccaaggagcgccgccgccgccgcaagcggtcgccgtcacagtcccccaacggccgcgcccgggccgtgccgcgggtttcgccgaagaaggttgatctggatggggaggccgcctccgccgccgcgccgctcttagcgacgctcctcgagctgagaacctcaacctcacccgctggaaggaatccaagccccgcgctgccgccgcgcccaagtcctcggacaaggagaacgtcactgtggggcaggagaaccggat

SEQ ID NO: 458212 - DNA, 407 bp, Sorghum bicolor
  unsure (1)..(407): unsure at all n locations
cgtccgcccacgcgtccgcctcctctttcgctcgagcgccgccagtcgtgcccccgcctcgtgctcccctccggcggccgtgcccgctgcgtgctcccctccggcggccgtgcgcgcagacctccttccttgacgtggccaaaatccggcgaggggctcctgcggccgagatctggtgagagggcacttcggtggcgacggcacggaggagcgcggctgccttggcgccctcggccccggtctcgtcgtcttccccgtcgaccctgccgctagccaacctgcgggcgagaatcgcactgccaaacgctgttccaaacagggccttagcatcatcctgccgcgaagcgagccatggcgacgaccaccgncgcgccgggtcttgccgtagcagcaaccgatcccatcag

SEQ ID NO: 458213 - DNA, 421 bp, Sorghum bicolor
cgtccggcgaaacaacagcagagccctgcaagtgcacctactgaatcaactcatgatctaacggttgttgaaacaaatgtagctgaacttgtagcttatgatgagcagcaaaaagccttaaaagaacaggattcgtcgtcaaatatgaacagccatattggaagagttgagcatcaagagcagaatactgaatcaaaggatgaaagagctgcatctgacaagcagcctgagcctgtatctaggcagcataaaccttcaaactttcctctgtcaactacccagattcacttgaaaaacagtgcaacagagaatcctaatgttgtaaatcaggttgatacaacgaaatcagttgccagtggttttggttcacaattaacctgtgtaccaaaggaacctgctctcctagatgagagatctctat

SEQ ID NO: 458214 - DNA, 462 bp, Sorghum bicolor
cgtccgcaaagaatggtcgcctgtgaatattgtgagtttgaattgcctgcagttgatctccatgaacatcaggatgtatgcggaaaccgaacagaactctgccaaacatgcagaaagtatattagattgcgtgaatggatagggcatgaaatacagtgccatacgaactcaaatggttctgcagacacatccagtgccagagcaattccagagagagaactacgaccgccgccaccagtgcgacctgcacgaccagcacgtcctgctcatgcttcaccacacaagcggctcctcttcacaattgctgtcactggaatagcagttatgattggctccatactgttccaaagggacgagagtttctagctccagtagccatggacttactctgtcaagttgtattaatgtataataaccccctcgaatcagtgcataaatcgagtctgtttgagagtatacccc

SEQ ID NO: 458215 - DNA, 251 bp, Sorghum bicolor
cgtccgacgtagtaaccaccagccggtttgatgcttaattgtgtgtgtgtgtgtgtgtgtgtgtgtgtgtgtaatgtaacttactagctgctgctgctgcatgtaatatctgcctgctgttagtcgactactaggtagtgtagtgtaccagatgatgagtgtgacagttatcttttccttttcagtaatgcgtagctagctagagctagatgtgtattattgtgtaataataatcctatgtgtgtataaaa

SEQ ID NO: 458216 - DNA, 312 bp, Sorghum bicolor
cgtccgctgcctgtccgtggcactctggaaggagaagctctacggcgacagccggtcagtgcggggccgcgtcgtcgtccataaggttgccggcgtggagggtggtgactgcgagtacggcatcttgggaggcgacgccgacggcgtgctgggagtagagcagaagccgccgccggcggcggcggtggcggcggtggctccggcagcggcggccatgggcatgagaagtggcggtggagtggagggagctgccgctgccgtgtccggcggcactccggtgcggccgatatggcagatgagggtgcttatggg

SEQ ID NO: 458217 - DNA, 542 bp, Sorghum bicolor
  unsure (1)..(542): unsure at all n locations
cgtccgcccagcccggcgagcgatggaggggtccgcggccgacgcggagcaggagcaggagcagaagcgggcggcggcggcggcggcgtacgactacgagggcgacgcgcgctgggccgactactggtccaacgtcctcctcccgccgaacctcgcctcccgccccgacgtcgtcgaccacttcaagcgcaagttctaccagcgctacatcgaccatgatttggtcgttgagccgaggtcattcactggttccactcagcccagcaggccagatgtaaggtcttcgtcttcgtcatccagcgagaacgtcagggcacgtaattcaggatctactncgaggtcagcgccttcaccgccgccaacaacacaaacagacattgctgccaatcctttacggttcgatgcacggactatacatttctccatcaacgcatggataccttgggtttctggtctgggaatgcttcctattttgccaaaacaccttgctgaccgagcttgcanactttcactgctgggaacaataccttcgtcaggatatc

SEQ ID NO: 458218 - DNA, 487 bp, Sorghum bicolor
cgtccgattctcacttgctttaatttcgagactacctgtttctcccatgattggccctacatgttcttgcatttcttgattggttcggtttctttggttgtgatgataggagcaagaagacggggtggagtcaagaactggtacaaacgaatcgtgttgtctgcagaatggattcagcatttgaggctgctgttgtactcgcacgtacatgatgcctctagacctgcgcaatctgcagatctcatcaccacagctacaaagattactgccctactctgaaggaggatatccaatactagatgtcaggacttcttgcagcagttctaggagctgctgcaggaggctttgcactactagctgttgtcatagtcgtaatagtgctttgcctatggcatcacaaaagaacttcagactcttcaaaaagtagttaataggtcaagctctaccagagtcacaggaagcagaagtttacttggaggactgattt

SEQ ID NO: 458219 - DNA, 392 bp, Sorghum bicolor
cgtccgagcccatactcgctttttgaaagcacaggaagaattgaaaaggtcacaagctcgttttgagagacttggtgatttgcttgcttcagatattctgaagcgcggtgctaatgaagaagtttccagtatcaatgttgatgaagatccaaatggtccttatgaaaggagcccaaatgctgctacagctaagaagagatcaatactatactcaacaagtgaagaagcgaaagctgtgaagaaaagaagagaacgagactctgacacaactaggccagataaatataggtcagaagctactattgcagaatttgaaaaaccaatcaagggaactgagccaacaaaatctttatatttgaagaagaaactgtgggaagatgaaaaggataaga

SEQ ID NO: 458220 - DNA, 538 bp, Sorghum bicolor
cgtccgcccacgcgtccgcttctttgtttaatgcagtaatacgcagctctcctgcatatttgagaaagtttatccttctttgtctcttgtggaaagagttattcacaacagtacatgtgaagatgtctccttttcaaatttgacttcaccgtagcacgggctggtttggatggctatgacaggttaccacaccacatatgatgatatgaagcatgccacacttattaaaggccatatttgtttaatttccataagtttctgagctaaagaaagttatagcttatattcagttcgctgcggggggacggaccaatgacatgcaaaaacttgtttggttcattgaatccaaaagatcaggctgagtagagcatttgtttggttggtttgcactgacttttgctgtattgaactgctgtattaaactgaaataaaagacaactaccaagatttttttattttgcttgaatcgattgtatgatactattttttaccatattaaagcttaatttacttcgaaatataagactaaatcgattgt

SEQ ID NO: 458221 - DNA, 474 bp, Sorghum bicolor
cgtccgcaaggaaaaagattcctgaacaagatgatcatgagaaccatgtccgagaagtcgagggaggctggtgtggcagtattggttccatggaggaaatgcaagctaaagcattgaaaaggcgagaagctgctgctaagcgtgagagggcaatggcatacgctttgactcatcagcggcaagctggttccaagcaacaaatttctacgagtctacaaggtcttgaacttggtgagaaccactgggggtcaaattggttagacaggtggatggctgtacgtccatgggaaaacaggttacttgactgtaatgccaaagagagtctgccaacgcatgaagataagaaggatgaggaagcaaattctcagatcacaccaaagggtaaagtgtcaacttcaaatactcctggtctgagcaagaagaaaggtgtaaccacaaaaagtcatattcagatgttagtgtacttattgcacg

SEQ ID NO: 458222 - DNA, 411 bp, Sorghum bicolor
cgtccgatggaaaaacagcttagtactgtggttcctgcatccatcgcaaaggagggcaaaagacttgagacatcattagggcgcactgtagagaaatcgatcaaagctaatattgatgcgttttgggttcgtctccaggaggaaaacactaagcgtgaaaaggctgatagagagcgaatgcagcaattggttactctcattacgaactcaataaataaggacttgccttctaatctggagaagtcacttaagaaagaaatttcttcacttggacctattgttgcccgcgcaattacacctattattgagaagtgcctgacctctgctgtttatgattcagttcagaaaggggtgggtgacaaggtgtgcaatcagctggaaaagtctattactggaaaacttgaagctaca

SEQ ID NO: 458223 - DNA, 403 bp, Sorghum bicolor
cgtccgtcctgtattatccaacagcttgctcttgcatataacttcagctttacatattgtctgtgctgcaaacaaatatattttgttatccataaccttttctctctagctcccagcctaaaatagttttcttgcaggtgtacttttggagtcttccaagttgtgctgggaaccaggtcttgtagacttattcctctcaaatcttcttttctggcatatactacgatgaattggtggtatataagttgctgatcttaattaataactaacaataagatatggtatcaagaagcaatatctttgttctatgattttctgatgcggagtagtaagacatgtctaaagtaagcaggccagaagtcagaagagccttttgtttttggataatgtttctacatttgct

SEQ ID NO: 458224 - DNA, 294 bp, Sorghum bicolor
cgtccggcggaagtgcaaccacactagctaggtcgcaatcgccggcaaccagggcagccgccagaagctccggccggtccgccaggcgctgctgttggtactctgcagcgtcgtgacgcgcatcctcacgatgcgcgagccgcacatcaaggtagactgccactgccacacgcccaaggcgcgcaagccgacgcacttggacgcgtccaagaccaaggagtccgacgcatcgccgtcgccgtacctgaagcctaagaacgacaagccatccagaggctacgagcaccaggcgcc

SEQ ID NO: 458225 - DNA, 445 bp, Sorghum bicolor
  unsure (1)..(445): unsure at all n locations
cgtccgcggacgcgtgggctagaagatgcgccgcgccctctccccttcctcctcctcctcctcctcttcaacaagtctcgccacccgcccccttgtcccagcaactccgccgccgccgccgccgccgccgccgccgccgtcgtaaagccctctccggctctcccccgtccgccgccgccgccgccactggtgggccaggccgccccagagaagaggccagaggagacgccggggacgtcgggccgcggggttcgagatggtgctgtgggagctcacggccatcaccgcctacttcctcgggctcaggcgcacctaccgnctcgcgctccgcatncagcgccgnctcatcccgcccaaccaccccaggatccgggacttcgtctacaggcgtacacgggatatcttcaatggtgcagtgtcagtgcacaagaacattcagcagaga

SEQ ID NO: 458226 - DNA, 466 bp, Sorghum bicolor
  unsure (1)..(466): unsure at all n locations
cgtccggtactctgaagccaaggagcagttggacttggcgaaaagaattgggaaagaagagcttatggtggaagactatggcgatgtggagattgaatatgaattagctcctgtgtctgctcagcttgcttatgtgcagcagctacaaggacaatctcaagaagctctgcaaacctatcttaatatgataaatgggcagtcagctgatccatcatcacttgctgtggcaacaacaaaccttatttcactaaaaggtacaaaagatactgcagatagcttgaagaagcttgatcggcttattggaacaactacagctccaaaccagttacatcttgttgaaaaccttgacttcaagttatcccctaggcagaaagaagctctntattctgcacgtgttcttctactgctccatgcaaataaaactgatcaggcacatgagtnnggcagtggactgctnggtatgttt

SEQ ID NO: 458227 - DNA, 310 bp, Sorghum bicolor
cgtccgtagatgcagcggaaggtgcggctatagccccccccatgcgcgtggcaccggaagccttctgcgctcctgctcctggatctccggtcttcctccttcaccaacatgtttcgcgcttctacgaggcagcatctgcaacagcacgcacattgcactgtcagcggagaggcctagtgccggtcgtacgattccatctacatataccgatgtggacatcgcggtggggacatggatgtcctttgtgtacagcaccgtcgcaagctatcgcatttattcgactactgtagctactgcttggtactggatg

SEQ ID NO: 458228 - DNA, 407 bp, Sorghum bicolor
cgtccgcccacgcgtccggatggttcagatgagtttttcttagtctcatgtccttacacagaaaagactaatgctggatttgataggttgttagctgctcctgtatttagtatgagtgagagagctttaggcatagtcctatttgattacaatcctgatagtgctgctgagaagaaggtttgctatttggcaaaaggagtcatggctcagatatccagactccttccatcaccagaactaccagcttacacaaagagaagaggagcagaagaccagaagaagggcaaaaaaagacgcatcatttgaatagtcgtattataataaagttttaatttaagggcactcctagctatgaagcttatgatgaggctgatttagtatctcatggttctgattcttctatctac

SEQ ID NO: 458229 - DNA, 431 bp, Sorghum bicolor
cgtccggacaatcctgtttatagcaactgccttgcaacaatcattgatcaaattggctctgatgaggcagctgtgtcttctgcgttaattcatactgtgggctctctgataaatgtggttggatcaaaagcattaccacaactcccattaataatgaaaaatataatgctaatatcacatcaaatttcatgttgccctagtggaaattatgctcatggttccactagaactgccgctgaactttctaaccaagacatagctgtgctgctatctgcactgacaacaattgaagtgattgtggaaaagctgggtgaatttgttaatccatatttgaaggaaatacttgatctggtagtactgcatcctgaatgtagcactcaaatgcttcccaaattagatgcaaaagcagcacatgttcgagacctactgac

SEQ ID NO: 458230 - DNA, 245 bp, Sorghum bicolor
cgtccgcccacccaaccccgtctcctccctcgctcgcctcgcctcgcctcgcctcgcgcggcgtgttgcctttttccgtgtgatctgttctcgcctcacgcttctcccccctcgctcgctctctcctcagcacccagacgagcgcgcgcggcgaccctggtcctggtccggcaggtctcccgtcccctcggactccctccgtgagcggagcctatctgtgcgggggcttgcgcggggcgtgacat

SEQ ID NO: 458231 - DNA, 356 bp, Sorghum bicolor
  unsure (1)..(356): unsure at all n locations
cacgcgtcacgctgtgtatggctctagcgataaggttgtgcagcacaattctatgtcttntgtatcatcaccaggacgagttagattaaaccatgcgatgaatctgtccactgggtacagcattcttgaattgaatcgacctctagtcggtttctctagtattttcctttttacgttgatgacgcgacaaaaaggaggcaggcaaggcagcttgtaaggttagcattttccttagatattccttttgggcagcttcatctagattctagagtgtgcctgtggagatatttcttcttttcattcacaggacagaacaaaaactcatgctgtaatcaagcttgaaacgccattccttt

SEQ ID NO: 458232 - DNA, 446 bp, Sorghum bicolor
  unsure (1)..(446): unsure at all n locations
cgtccggcatttacgacgaagatcgagcttttagtttgcttgttcacaaactgttgttcttgcatgcaccatggatgacgacctgaaacatctgagggtcagcttctctggggtgaggcaggaagatcgtggccgccgcggcggcgagacaatcccaacaccatcttttcagcaaaggacgagttcacgcagagggtcactgagcaatgcagaggagtacgacgcggcgtatgcagccacggtggcagcagtggcatacgccattgccgcgcgagaggaggagaggctgttagcgtctcaagagagtccgtcgccgtatgctgccgcggacaagctttcgcgtggaaatggnaacaagcagcagcgtactgctgctgctgctgattccatggatgagcttgcttcgacgaccaccgccgagtccagcaagtcaccacgtacaccca

SEQ ID NO: 458233 - DNA, 472 bp, Sorghum bicolor
cgtccgcttgaagtaatcgactgaacaatcatgtgtttgttacttttctttgtcctatattttttcccctttggattatgaaatcctcaatgaccgattataagttggaaggtggtaaaattaagatatactggcctagttgccattgcattgtaccatttaatttagttacatgctgttgtatcagctactacctccattccttaaagaggtgcatagccagaatgacattctttaagggatgaagttaatagttgcaacaaacccttttcttctttggctccaaaaggatcctttttggtacatgccaataggaaacaaagtgtgtttgaaaagcctgctgagtttttctaaatggcgtatgatccaatgagatgggttcattggttttgttagagtaaagatcaaggtcgcttggttaggggccaagcaagccttatctctaattagccctaaactaatgggctataca

SEQ ID NO: 458234 - DNA, 265 bp, Sorghum bicolor
cgtacgaaacaacacagccttcttggccatcgagctgctcaatgagccgttggcaccgggagcaaatctgtctgtactgatgaaatactaccaggacggctacaatgcagtgcgtcggtacacgccagcatcctatgtgatcatgtctaacaggttaaacatagcaaaccagacagagatccttcagtttgtgggcagcttcgatggcgccgtcctcgacgtacattactacaactggttcgacaagaagttcgacaacctcact

SEQ ID NO: 458235 - DNA, 295 bp, Sorghum bicolor
  unsure (1)..(295): unsure at all n locations
cgtccgaaaaataaaaaatttaaaataaatcaaaatatttnttttttgnggaaaaaaaaaggctggccgaattaaatagtccggacttatccacccagtgcttccaacttttaacttgtttatttggatctcggggcgccctttttaagggccccaatttaacatccccttgcttgcgaagacaaagtttttttttagggtcaccaaatttcaatccactgccccctttttaaaaccgtcgtaactggaaaaaccctggccttacccaatttaatagctttggagcaaatcccct

SEQ ID NO: 458236 - DNA, 307 bp, Sorghum bicolor
  unsure (1)..(307): unsure at all n locations
cccggtcgaccacgcgtccggactctgtgacctagataccggagggtggaggctttgtctaaaccctcggccaccgtatgcaccatcggtcacctttagcctcacccggggagcacaatctgtgcatggagaccgcagattcggacgactgcaaattgcncacacgacgtctacaagcttttttgacactacgactagctctactttcgcgatactgtacgatgctgagccgtatgatgcgccgaaggcacactacgcaactgtggtggaatcctacactgctattaccgaggaggcgagggctgta

SEQ ID NO: 458237 - DNA, 397 bp, Sorghum bicolor
  unsure (1)..(397): unsure at all n locations
cgtccgacaatataccacctccccatgttgtggcttctgcagttgagaaggtcaggcccagagttcctgccggtgtatctatgctccctctgcttcgcctcctgctgccaaacacgcaccttgtgggactaatggagatagagaagctccacattgtaatggaatactgaaggatgagcgtcgcaaattcaatcaacgttgggcttctggggatgcgggttaatagtgaaaatacgtagtcatggatcaatatgaacggtagcaagcattgctgagtgctcttgtgatgaaaatctgcgagggtgttattacagctgttctgaattaagtggattagtcaaggggtatatttgtactatttgtgttgnatcnaannanaaaaaaaaaaaaataaaat

SEQ ID NO: 458238 - DNA, 171 bp, Sorghum bicolor
cgtccgccacgctggcgtgcgtcattaccatggccttactcatcgacggaggctactacgagcaggacattcctgcgttcgtagcgcggcttaagtggctcaactacagctcatactgttaccgactactggtcgatatccaggtacgcaacggcggtcattactacgact

SEQ ID NO: 458239 - DNA, 403 bp, Sorghum bicolor
cgtccggctcgccgctgggcctcggcccgcaggcggcacctccacctggacccggcccccctcgtcagacacccaagtacccacgcggcacttccacaaggacaaggtggatagcgagcccaccgcacgtctcactctctctctctctccgacgaccggtggactcccgccgccgtcagcgccgccgtcgccgccctgcgctaggtgccgaggccttcgtcggtatcttcgccggcgacgggcactcaccaggtactcagccatggtttttcttgaggcagagatgtcatggaatgtgctgatctcacctagccagctggaccgcaagggcctcctgctccgcaaggctatcattgtgcgtcttctggaggatgtcacaaacaggagggcttccaaagagcat

SEQ ID NO: 458240 - DNA, 417 bp, Sorghum bicolor
cgcgaagccgccgtggaaggacccccggcgatgggctccggcgaggaggacacaggaggcggaggaggggcggtgcggggtgcggtgctgaaggcgctcgtggtcgtcggcggcgtcctgctgctccgccgcctgcgccgctccaccacccgctgggaccacgcgcgagccgtcgccgacgcgctctccggtgagaagttctcgagggagcaggcgaggaaggatcctgacaacttcttcaatttgagaatgctcacatgtcctgccaccgagatggtggatggctcgagggtgctttactttgagcaggcattttggagatctccagaaaagccttttagacaaagattctacatggtaaagccctgtccgaaggagatgaaatgcgatgttgagttgaagtcatatgcaattagg

SEQ ID NO: 458241 - DNA, 503 bp, Sorghum bicolor
cgtccggcagaatgctagactgataagggacccctgagatctttaaaccctctttttcaccatcgcatgaattacttctcatctccttttaccgtttcatgaatcaccatcttttacagattggcagcgttgcatcatggagctttcagggcaggttaggcagcagcgtaggttagcaagagttcatggacgccccgtggctgtgatgattctatctacgagggagagggaccccatgattccaacaaaagcttcgttggttggacgttggacgcaaacttgtcgaaggaatttgcgggtctcgatcgacagctcatcaaatcatcattcggcacaggggcaaaagacgctggaatctgttatcgtgatctcatccagggggcacttgattattgtccatcgaaacgacgaaaccagagaagcaggtaacggagccctcgttttgacaggaaacgttctacctggatttcttgggtcaatttttggtgcacaacttttttttt

SEQ ID NO: 458242 - DNA, 396 bp, Sorghum bicolor
cgtccgcttcgccgctccttgccttgagccgcgccgtcggaactccacctctccttgccttgagtcgcgccgctggaagcctggaacccgacgtcgagctccgccgctccttgccttgagccgcgccgtcggaactccacctctccttgccttgagccgcgccgctggaagcctggaacccgacatcgagctccgccgctccttgccttgaggccggtgacatcggccaagaagaagcatccccagccccacgacatcggccgagaagcatccccagtctgccaccctgcatttaacgcccgcagcaggtcagattatactactactggatggccaacagcgccatcgacccgaccactactcccacgctgagagagattcgaaaatccaacttca

SEQ ID NO: 458243 - DNA, 318 bp, Sorghum bicolor
cgtccgaaaatttgaatatggatgaggtcaacagggcactctgtggataattctatcctacaaagatggcagcatgcttcctatatcctgatcaaatgcaaaacatcaaggcttaccatcttgggagttcgtctgactgaaacttggccggaggtataccaagagcaagaacagaagtagcagctgctgcatcgccaccatgacgtgctcttctgggttaggcctcaacacaagttgcagcagaccagagctaactctgatggctatccttggagaagtctatgcaatgagctaatggacaagcgctgctaccaaatg

SEQ ID NO: 458244 - DNA, 281 bp, Sorghum bicolor
cgtccgcagccgccgttctctcctctcccctgccaggcagagcgccgctccctcatcctctcgccgcgtcgctccatcgtcctctcgctgaacgcgctcctcgccgcaccgcgctgcccagccccttcgatcctcaccacgcccgtggcccctgggtctgtctctcgcacgcgcggatcgagcaagggtgtggctcctttgacggcgcggccccctggtaccttcgatggagcatggtccctccgcccgcactgcagcagcgcggggcctgagcctggatc

SEQ ID NO: 458245 - DNA, 402 bp, Sorghum bicolor
cgtccgaacagaggcataattagcaccaccttgtaaggtgtaatccatgtgcctacccctgctatataacaatccaaaccccctctcagcagctgctgcctgctttttgccttactctctctttctttcacacaatcccactacttgttagtttggttttctctttacttcctcattggtgagtagtgtcctggccatggcgtcgaggaggaggggcttctcgggcctgccgccgccggcgtgcctgccggtggtggtgctcgtcgtgtgcctggcagccgccgtggcggtgtcgggcgagccgctgccgcagtactacaatgccatcttcagcttcggcgactccttcttcgacacgggcaacttcgtcatcatcaacttccggaagctggccaacatgcc

SEQ ID NO: 458246 - DNA, 430 bp, Sorghum bicolor
cgtccgcttgtacgaggcggccggccaggtcgcgcgcatgcgcgccaccaacagcatcccggtgccggccaacaacgcttacggcttcggccaaagcggtttcgcgccgccggcgcgcaagccctcgccaccgcctatcgctccgccctccgccaaggttcctgctggcggcgggcagggccactaccacccgttcgcgcacttggtctcgcagcgccagatgcaggctgcacagttccatctcctgaagcaacagcaactgctcaagctgcagagggagcgccagcagcttgctgccgccgccgcgtggagcgcgcgccagggcgcctgtgccaaggccgtcggcggaggcgacgcgccgcttggtctgaacccggcggcgtggcccccgcttcagaagccgccgcagcagcagcaccagggcgccggt

SEQ ID NO: 458247 - DNA, 326 bp, Sorghum bicolor
  unsure (1)..(326): unsure at all n locations
cgtccggtctcgcccgcggcggacctattctcctcatccgctcgccgcgccgcaacccggaggccggaggagacttgcgctcagtcgagcaccacctggggctggggcccagcatcctcgcgaccatctccggcacgacgtccgccctctgcagccccggtgtccctgcgaccgtcgctgctgtcctacttcgccactggccagtttgccccggcgactagcaccaccagaacgaacactaggttttatcttttggcaatgatgatttggtgtattttcgtgggctaaaagtgactcgtacctncagtaaacttttcatcatggat

SEQ ID NO: 458248 - DNA, 457 bp, Sorghum bicolor
cgtccgcaggaaactgaaccaccatacaaagctgttttagcgaaaagggagaacttcagggatatagtggttactccttccatgtttacagatcacttaccatggaggtgccactttgctatgcagaaaattcttgaagctcaaacgcctatgcataggcgtgcaaattccgattcacccatacaacatttggtctgattaggacaaaactgttggcccatgtacagaatgacgtgaagacagaaataatgaatatcacatttagcagcatggtttattccaggctggaggcatattcagtccttcaggcagccatatcttcgtatacaggattcagaagatatccgtgacagaccccaaaatcaggttgagcttattgacagttagaggcaaatgcctagaggcaggcacaagaccactggatctgatatctggcagaatagaaaatctggttact

SEQ ID NO: 458249 - DNA, 335 bp, Sorghum bicolor
cgtccgtcgacccacgcgtccggccgccaggaaccttagataatctcgtcttggcagggccggcggcaggccgtgccgccacgagactcctcgccgaaaccgccgggtcgggtcgcgcgcgtcaaggagagaccgagagatcgcgttcgcgcgcggtgggatcggagagatttcgttctagaaaatcgagctcccctgaggatggagcgcggcagttcctggcggcggctcaccgtggtcgtcggcatccttgtgtgcgcggacgtcttcttgccgcccgccgccgagctcaacataggtattcagtctgtcggcgacagcgcgagcaagcagta

SEQ ID NO: 458250 - DNA, 180 bp, Sorghum bicolor
cgtccgataagctgcagcatgcttgcctcaagagactgacgatgctgagcctgcccgctcgcagcagcccaccatcatttgatcggtgcctggatcgactagaaggctgctgctggagactatggccaagagcacgggcgagttctcagcagatctgcgctctgttgtccttaagcaagc

SEQ ID NO: 458251 - DNA, 368 bp, Sorghum bicolor
  unsure (1)..(368): unsure at all n locations
cgtccggtgcaattaacagttcatggagggcttctcagcaaactaacatgtacggtgcgtcaaacggtgactttggttctgcgaggtcttcattcgcgccagcacctgttgaacctacagctggatcattttcaagatcctatgccgagcagacgatgtccactacacaacgaggggataggtcttctggcagtaagccatgggagatgcagcagtattcgcaacagaggcctggttatggatccaactcccagttgagtgatgatggatcatactctgatgcccaggacagctatgctccttcctatcaccagaatggaaaggcccctgattntcaagcagatgaacctagngccttgacctacaac

SEQ ID NO: 458252 - DNA, 436 bp, Sorghum bicolor
cgtccgaccagtcattagcaaagaacactgaacaccaggccagcagcaaaattaaacacacacaaataattccttgacagcagcaatggcgagaacgaacaacaagaaggtgacgacgatgctcctggtcaccacagtcgccgtgctgggcctcctgctagccgtggcctcgtcggcggcgtgtggctgtggccggcgtcgcgtgcacctgcagctgtacatgcacgacgtgatcggcgggccgaaccggacggcgatccggctcatctggggcgtaggcctgccgcacgagtccatgccgaatcgcaccttcggcgacacggtgggatcgacgacctcgtcacggacggcccgggcattcgtcgcgtcggcgacggcgacggcgacggcgacaccaaggcccatcggccgggcgcagggcacctacatgctgagc

SEQ ID NO: 458253 - DNA, 125 bp, Sorghum bicolor
cgtccggtgcatcagattatgttgcagaaccaccaaagggttctacagtggctattttcggtctaggagcagttggtcttgccgctgcagaaggtgcaaggattgctggagcatcaaggatcatt

SEQ ID NO: 458254 - DNA, 505 bp, Sorghum bicolor
ttcttggagaacatgagtctcgcatacatatattcctgaaagaaggtgaccaaatggaaatttgtacatagataactggatctcaaggcctccattgattatcgttaactgttggtcttcattaattcaactggaagactggaactgcttagtaagaaccaatgagaacaaggaaagtgcttgctaaataggttatgcatgtagacccctgtttatacccccctccctagttttctgtatctgctgtccctatctgttagagtgtgattcaatcctactcattcttgggttggcaaaatgttgcctgatctccttggtgtcctatgcatctaaactaccgaggaaaccttggaacacctcttctttaagtgtgtcttcgtgcaagcttgatgtctcagtcataatcttagtgttgacaaccgggttgaaccttttatcactttggaacatttcaaaccataagtttggagtcctctctacatggaaattatcatactactgagct

SEQ ID NO: 458255 - DNA, 330 bp, Sorghum bicolor
  unsure (1)..(330): unsure at all n locations
cgtccgcccgcgcgtacggttgaaaacttacatagtaggagtgatgcataattcaaggcatgctaaaggcttggaaaataggactgctattgcaaatggaacctcaatggatgcctatagagataaaggtcctaatgaagatcacagtgcttctgcagttgacaatggaatatctgtgaagttatatgttcagcaaatggagattattgaggacaaaactggctcacttttaccaganttgaaacactcttctagnttgtgaagatatgtggtgaccttgaccgagtcaaagtcacttaaaaaggatatggttgaaatcaatgatgcaac

SEQ ID NO: 458256 - DNA, 101 bp, Sorghum bicolor
acgcgaggcgacttgtactagtgtcatcaagttcagacccacatcgtgcagcagctggagtacctcaacaattctcggaatactaacccaccttccaatgt

SEQ ID NO: 458257 - DNA, 209 bp, Sorghum bicolor
  unsure (1)..(209): unsure at all n locations
cccgtccgnnggagaaactncaggggcngnngtgtcttattcgagaaaagaccanntctagggaccaggnnaccgcccaaacatttttatttgatnngtgcagggtttggggcctgtagaaagtaatnnaatgtaatggtagcnctnggtaatattaattctcgctgcattanntgtaaaaaggatnngagagaaatnngtggtagtcc

SEQ ID NO: 458258 - DNA, 77 bp, Sorghum bicolor
  unsure (1)..(77): unsure at all n locations
cgtccgtaaaaaaaaaaaaaatctnnaggtcaaccaagaacggctcaactcgatcaacacccttgcaccatgactct

SEQ ID NO: 458259 - DNA, 182 bp, Sorghum bicolor
cgtccgggcgagcgagggaaccagacgagatccattcagatctgttgctgttgatcatcgacttggaccccggataggaaccttagctagcaaaggcggaggcggctagagagtagcagtcatggcagcgggtctcacgctcgaagatgtactcgtactatggctgagcagcaggcgacgca

SEQ ID NO: 458260 - DNA, 319 bp, Sorghum bicolor
cgtgccgagaaagaccaggcgcaggatctcaacctgaagaccatcaccggacagaccctgtcccacatgatattgatctgcaagagcggggctgtttagtactaatgtactgaagcctacaatattatctcctttcatatgttaatagataacaaagatgtggtcattcatttaatgttaaataaaaataatgcggcccgcccatttagaggatcccttcttacttacgcttgcattctacattttatctctattatactgttacctaaatacaatatactgctcgccgtcttacaacgtcttcactgtgaaaaccctt

SEQ ID NO: 458261 - DNA, 467 bp, Sorghum bicolor
cgtccggaaatgtctacagatgaagaatcagatggtgttgttatatgccatctgaatggtaacaccgatggatgcgacgaaaccattagtggtagtcgtgatgatgatagcccagaaggccaggaaactaattccattaaggaccctgatgtacaaggtgacacacaggaagacaagtgtgtaaatcaagattcactgaagttgattgatcaagagaagtctgctccccccaagtccccagcaaagtctgcgactgccagttctggatcggagaggcctaaacgtgttgttccccaaccattctctctttctacgcaaagaaggtcatcgggagtaaatggtggtgtgaccaatccatcggcaaataaggataaatctggtgataaaagtagcatatctccagcaagcatgacaaagaagagtacgccggtggcaccttagaagactttgcagcctgagcaggcatt

SEQ ID NO: 458262 - DNA, 81 bp, Sorghum bicolor
gcgtccgccacgcgtccgtgatatggttgctactcatttaaccctgttatatttgtctggtttgttcatcacatatgtttg

SEQ ID NO: 458263 - DNA, 290 bp, Sorghum bicolor
  unsure (1)..(290): unsure at all n locations
ctcggacccagcgactgtacggcggaggggctgtncttaccatcgtgacttctncgcaccgtccgcctccgcccttcgcccgagctgctcatccagccgcacccgcaccacgacctcgtcgccttcccctccctccctcaactcgtgagtcgtttgcaaagtgaaggatattatggaggtgtccggctgctgatggctatctgtaaagttttctacaatcactgtattcaaaataatatcagtttaaaagctgaaaatttcaccttatcatatgatactaatattcctcg

SEQ ID NO: 458264 - DNA, 510 bp, Sorghum bicolor
  unsure (1)..(510): unsure at all n locations
cgtccgcccacgcgtccgaaatgaacaaatcatttccttttgcaaaaataatactgcattggcactgatagtagcaaagagataggatgcagtgtcatatctagaatcaaatttggtaggtgcgttctgcaaaattacaggatatcttttggttttaggttcaacagggagagaaacacactatatatcgcattaagttaatccatgttgtaatcaacaatataagcttgattatgtaagtttatatatctcctttgggtgaattttcaatctattttacgcgtttggttgttaatttgcatcgcctacaatgccaccgtagcgttagcacgggcaatatactagttagcttagtaattttttactagatctaatacaataacatatattgaagtcaaattcatatgtatgcgtatataataaactgaatatcatatagtaataatatgtatataatgaattatntttaagaaaaactcatagcaacacgccggaaattcacctagttct

SEQ ID NO: 458265 - DNA, 73 bp, Sorghum bicolor
ccacgcgtgcgcccacgcgtccgaaatgaacaattcatttcctcttgcaaaaataatactgcattgtctctca

SEQ ID NO: 458266 - DNA, 378 bp, Sorghum bicolor
cgtccgatcctattcctatctatccctcactcgttactcctccttccctacatccatcgatccttaattaggtagctgctagctccaccacccaaccaatctgcaaacagctagcaaattaaacctgatcgatggatcatcatcatcagagggtgagtgggtgacagtgacgacgacacaaatgccctgcggctagctaaccggtatttacaagatttcagctcagcaccttgcattctgcgtagagatcagggccaggctgctacctagctcatcatcagcttctcctctgatccatccatagtcggtctccacgacatccacactctctgatctcttgttctaagctagaggccagagcacgcgcccacgccagat

SEQ ID NO: 458267 - DNA, 424 bp, Sorghum bicolor
cgtccggttatgggcaatcccagggtcctaactatggccaacctcagtatccgcaacaggcgcctcaacagaactacagccatgggtatggtgatcctagatacaatgctccccctccgaaccagcagtactatggtcagccaccaatgggcccgcagcaaggctatcctcaacagccagatccctatgctaggcctccatacagtggacctggacaatggccgcccaggggtgctccagccactgatggctcctaccaggcgccacctgcatcttatgggccgccgtctcagcagcctcctgcttatgggcaaacatacagtgcagcaactggacctgatgggtatgcgcaacagggttacccacagcagggtgggccggcaccagcttcatatggtcagagtgcaccagcagctccaggcta

SEQ ID NO: 458268 - DNA, 481 bp, Sorghum bicolor
cgtccgcctcacgcacggtcttcccctccccctctcccacacgaacgacctgcggactcctctcatctctcccgacggacgaaccctagggcagggtgccaagcaaggtggcgtgcagagtgctcttcagccgttgcagcagcggccatggcggcccatcgcgtggcggcgtggattcactaaggcgcaacgagtcttcatcttcgccaactccacaggcggtggtgcgacgggagcatcatcgtcctgccgaatctaatccctatcgaagcccatggtgacttgaggggtgagggcgctgtgctgagacattctgattggaattgccacaaatcagatagtagttggctgacgacaaaagctatggtagtggtgaggccaacagcagggggcaacaagtacatctgctacatctcgatggccaggcccgtgcgggaggagtgcgactgccacatggagactgcagagcaaattaggagag

SEQ ID NO: 458269 - DNA, 345 bp, Sorghum bicolor
cgtccgcccacacgtacggagggagatgaacatggaccttactgagaacatcttggataatctgcaggtcgaccacatggacaaatacgggaaccactgacacgatctctactgggacgacgcatcttgggcacacgctcaagcttacgaatcataccatggagactcatcttatagactcaacctgcatgatgatgacatggaccctggtgtcgcacgttccagattatgatgacgtgcgtcttgtccagaagagctatgacaacaggactaccacacacgagatcgaaacttacgaaggaggcgatgaaaggagttgctgacaacatcgacgaggatctggaa

SEQ ID NO: 458270 - DNA, 264 bp, Sorghum bicolor
cgtgcgagctactccataaatcaacattatttacaagttacctaccaaccaacatcaacacataaaacaataacttctataactggaggggatatattttatttgtcacgaggcttaaatctttttacattaatattttactaacataaccaatcatctaatacacaaagaacttcttaacatctttaatatcatttttttcaataatattccattctttttattaaaattatataatacatcagctatatttaaaacttttat

SEQ ID NO: 458271 - DNA, 249 bp, Sorghum bicolor
  unsure (1)..(249): unsure at all n locations
ggttgacccacgcgtgcgagcccaccgaattccctgcctgcgattcctatcccctcgcctcctcgtcttcccctatgggatcgccggataggaatctcaaagagggccgttttattcaagttaagggagccatgtatcacattgatactgtatgcctatcacctgtaggaccacatccttagaatcaatatttnnnnnttcttcggtagctcagcttaccatgaacatgtgcttccaagtgccacatgg

SEQ ID NO: 458272 - DNA, 429 bp, Sorghum bicolor
cgtccgatctactccatcaaacttcattttttagaagttttttgtcattggacatgaacacatagcaaaatgactgcttgaactggtgaaaacatattttattctggccatgcttaaatctggtgtcatggatataggcctaacattaccaaggagctaggccagagtttttttcttttcttttttaatttcatttttttctataatctggcgtgcagtatgtaagtgtgttatttacaatagctggttttcaaattttcattctactgcatgcactttaaaatgctttgcttttggcttatgttatatgtctgcaattaaattatacattttgcaggacacacctgaggatgctattgtgacaatttgtggtcatgttttctgctatcaatgtatacatgaacgaataacgactgatgagactatgtg

SEQ ID NO: 458273 - DNA, 335 bp, Sorghum bicolor
cgtccggggaagggtggacgggctcctgcgccgtggcgggcgggcggatgtacatcgtggcggagtacggggagtggcggcttaagcggtacgacgagggccgggacgagtggcggatggtggcaggcagcggggtgccacccgaggtgcgccggccccacgtcgtcgccggcgaggtcggggaggtcgcaggcgggaggcggaggatttacgtcgtcggcgccgggctcgacgtcgccgtgggcactgtctctgccgccgccgccgccaccgcggcacccggcgtcgaggaggaagtggtggaagtgggaagtgttctagggcccttgctagtt

SEQ ID NO: 458274 - DNA, 73 bp, Sorghum bicolor
cgtccgcccacgcgtccggccccgcctcgcctcggggatcccgccgccgctccatccgcttctactcccccac

SEQ ID NO: 458275 - DNA, 60 bp, Sorghum bicolor
  unsure (1)..(60): unsure at all n locations
cgtccgnaaaaaaaaaaaaataaaaaaaaaaaaaaaagataagaaaaaagagcaaaacca

SEQ ID NO: 458276 - DNA, 504 bp, Sorghum bicolor
  unsure (1)..(504): unsure at all n locations
cgtccggtgcaaaaccacgctgacgaagctgacccagcaatggcgaccctcggcctgttcccctcttcagtcgccgcatccaccgccaccattcgcgcccccgcccccaccgggccgaccagcgccagcacccgccaacccccgcacgcccgccgcctcccggtcctcggacgccgcgcgccggcgatggacgccctccgcgtgtcggnggccgccgagcccctcctcttccccgccgccaccgccgccggngggcaccccaggctccgcgtgcggacccacgtgcagggcgggggcgcgccgggcgtggcgccccggcggagggggacgccgccttctcgtgggcacccgtcatcctcccgtaagatattttctcggattgtagcgtttggggggtcgtctggaacgcacgcgcgctgggtgttgaattaggatgcgtttctagtccgattcaaccctccacactgtctgatttgatgtactatagtgtggaatcgatgcact

SEQ ID NO: 458277 - DNA, 250 bp, Sorghum bicolor
acccacgcgtgcgcgacatacgcatatcgccatctaatcttctcgtctcgtctcgtcccctcccttctcttctcttactcgcccaatcccatacaaaggcaagtctgtaatcatctccccgctcgcctcgcctttcctaataatatcatatacaatcgactcctctttccttacttccccttctaactctatcttcccctatccacctctatatgctcaaacttttgtacaacctctctctctcttccta

SEQ ID NO: 458278 - DNA, 534 bp, Sorghum bicolor
cgtccggtttcttggacgtgcatggctacactggggtccatgcaaacagatagctagctagtcgccattgtcgcatgcatgcagtcgccaacagcttaacgttgcagtcgccatgcattgtcgatgttagtagtaggacagctaaaactgtctgcatgcagtttgctcagattttctagctactagaaaacacatacggcccaccctgtccataacctgggttagctgctgctgtatgcgcaacccgaccaatcatcgatgagctagctagctagactgaatgcatggtgaggcgcgtcggtggccatgcatgacttgtcttactacttgtacagcacacactgattggagtccatgcaaacctgtagcgagatctcgatcgtaacatccatccacagatcgacgatctagctatacatacttacaaataagccatgggtggtcgtgccatatcatatatgagggtatgagtactggtatataacaggctagtactagagtagaatatacttatgcatttctagtacatatata

SEQ ID NO: 458279 - DNA, 533 bp, Sorghum bicolor
  unsure (1)..(533): unsure at all n locations
cccgattgaccgagctgcgacccacgcgctgcgtgcagcctgctgcctcggcgtaaagccctcggcgctgcgggagcccggccccggcacctacctcccccaccacttcgccgccggcgggtggagtcgggccggagcagccgctcgctctcctctgttaccttaccccccgaaacagaaaaagaaaaaaaaaggagagagtaccaagcaagcgagccgaccggcggcagctcgggcagcagccatggggcacggcgtcagctgcgcccgcaccggcgacgagcacgactacttccgcgcggcgcaggtcggggacctcgacgccctgggcgcgctcctcgccgccgacccctccctcgcccgccgcgccaccctctacgaccgcctctccgcgctccacatcgccgccgcgaatggccgccttgaggtgctgtccatggtcctggatcacgggtgccgccggacgcgggaatcggccaggcagactccgtgatctngcgggatcacggcaagtcgactgcgtgctaagctct

SEQ ID NO: 458280 - DNA, 502 bp, Sorghum bicolor
  unsure (1)..(502): unsure at all n locations
cgtccgcacacgcctgcaacccgtgcgccgccgctgaccagagatctggtgcgccgccaccgccggcccacaccgccccgtccaaaaaagctcggattgcccccctgcggccctgcccccgccgtccctgatcgagtgatcgaccgaggccctgaccggcctgaggcctccgtcacctctgctcgccgccggccggggctgccgcctgccagatcgagaacatctcctgcgtcaatcgagggcacgacttcattcactgaccggtacgtgtgtccaattcgtttccctgtaacttcattcactgggcgtttccttcgtgatttcatctgtgatgtgtgttccatccgttcatcattttattttttgtttatttattaggcgaaatctagctagctaattcgcccccccagtgtgtagattcatgctagttctaccatcatctctcaaacaaaacangcaggcggctttatttatttatttcagcaccaatctagtatgggct

SEQ ID NO: 458281 - DNA, 411 bp, Sorghum bicolor
cgtccgctcaactccaaaccaacgcctcccataaatccaaccactcgaggtcactctctgctggcctctctgcctctgcccaacaagatagagagccgccggcctgcaggttgcatccggccatggcggcgccatcatcatcatcgccacaaccaccacggcgaaccgccctactaccagtcctgctgctggtggtggtgtctctcctcctcctctccgtcgtcgctggccacgccgccgcagcgagagtagtggtggcggctgaagcgagctcgagaagccaagagcagcggtacaaagatgttgtggtgagttaagcctaccattaccagcctagctagcttttatgtttcgcgcaagaacgacggtcgtggcgtcaagaagtcgatgagagtgcaatattgtgtgaca

SEQ ID NO: 458282 - DNA, 430 bp, Sorghum bicolor
gtcggcgagacaagatctcttcagagggacgatcgacgacgacgacgatgaaaaattactaagtaaattccatcgacggaccataggctttgagctgcagcagaggctgttttgtagggtgttgcagctgtttgaatttgaatcctttccttgtgtgttcctcccctgtgtgcttccatatcatcatcattattattatttttttatttcgccatttccagcctatactagtgaaatgcatatatggcatattgtagttccattgtaatgtatatttttttcccctgatgatgaaggctgtacaaatagaagcatcctggagtatctgctgttctttttttccctctttcccttcacttgtgtaagtgtaagatataagaaccctccgaacttatagcaccaaaatgaaagcaaagcaggttttggtgtc

SEQ ID NO: 458283 - DNA, 393 bp, Sorghum bicolor
cgtccgaaaaaaatataaaattaaatgaatgaccctaaattaacccctacaaggaacacactaaaaaaaaataacaacacataggggacggggtatacttatacaaactaatcttcttcaacaaaaaaataaaacccatacggggggggccgtttacgaggtccaagttttctccccccggccttccggagtttaccctttcttttgggtcccctaaaataaaatctctcgtccctgtttttaaactttcttatctggaaaacccttgcttttcccaattttaagggcttggcgaaaattccctttttatcccgcggggatattatgaaaaggcccccaccatttcccctttccaaaaattggcacatcttaatggccatatggaccccccct

SEQ ID NO: 458284 - DNA, 253 bp, Sorghum bicolor
aaacaacagtcggagacagtactatgtcctccagtcctttcctgagatcaatgtaaaccaccctaagagttacacttacaccgggtagtacaaagcttaagggggctgcaattggctgagggggcacaggccaacccattgcccctgctgcacaccgccgccataataaaacggaagggtaactaagtgctgggcagcctaatgctacccaacactgtcaggtttaccacgatttcaattattaaagcaaatg

SEQ ID NO: 458285 - DNA, 512 bp, Sorghum bicolor
cgacccacgcgtccgaaaaaaaataaataaaaaaaaaaaaaaaattaattataaaaaaaaaaaaaataattttaaaaaaaaaaaataaataaaaaaagggaaaggggtatatttttataaaaaatgattgaattaaatatttttgttattctttttgggtgttttttttttagtttccaattttttttacggttcatttaatattatatattttttttatttttaattcttaattcatttttttgtccgtgttttttataaaatattctttttaaaacccttggtattccctaatttataattttttaataaaatcccttttttaattgttggttatatacaaaaaatgtcctataaatactgtttttaaaattttttccatattttatttgtatttggagtgggtcttgtgccgggcttttaattttggttttttattatttttctcctaaaatttccttttttcttttaaaggtctttttgccccttttttttatgttttttcctttctt

SEQ ID NO: 458286 - DNA, 515 bp, Sorghum bicolor
cgtccgaatatatacctatgtacccccatatataactaaataaaaatatacattttaaacatttatttacctctgttataattcttatttcagcgtatatatctaacatattttacccgtatttaaaaacttctgtgtgtccactaacgcgcgcgagggcgcgcgccttgcactagtagttctgaagcaacagcagccgcaaaagcaagagccgcagcttccgccatcaccactgaagaaatattatttatttgtagcttgatgtaggattttgtattggttcttgggtcaagaaaggagattcctaatcctgccggcttcggcgcgctctgcgatacctccggatcaatagaggcatcaatgaaacactgagccacatcgggaggttcaggaaacctgcaaggaggattgatgcagtgaatgagcacctaagcaaaggagtggatgtgtgtccgaaccgccaaatgacctgcaaaacagaccaactacgcttgtggaagccgagatcatttctg

SEQ ID NO: 458287 - DNA, 381 bp, Sorghum bicolor
cgtccgcctccacacatcccctcctccgtcgtcctctgtttataaaactcgccaggcgtccatcgcttccgcttcggcatcagcgacggccgccaccaccgctcccctccctctcctcctcctcccaccgcggccattaccacagcctcgccagcaagccgggatggctgcactcaaggcgtcgttccggggggagctcagcgccgtctccttcctcgactcaagcaggggacctttcgtccagcacaaagtggattttacgtttcaaaggaagggcaaacgagctatttcactgagaaggacatgctgttctatgcaacaggctccaccgccagcatggcctgggagagctgtgctgagcctgacccgaggtcatgggat

SEQ ID NO: 458288 - DNA, 432 bp, Sorghum bicolor
cgtccgctcacccgtccctctcaccgcctcgttaatttttcgcccccatctttgaacgccgcggctccaacctccctccctccctccctcggcgtcccctccgatcccgcacctataaatcccgccaccgcagccgccacagcggaccgcaagcacgcaaccacacagctcgttgctgctcccgtctgtccccccaccgtgtcctgccgttctcccgtcgccgggggcggaagggttcgtcgaggccggcgggccggcgattagggattgctcgggagccccgggatggcgaagctgtacgtgcaggcgttcccgcccgcggatctgaacaagaacaccgagtggttcatgtacccgggcgtctggacgacctacatcctcatcgtcttcttctcctggctcctcgtcctctccgtcttcggctgcacccct

SEQ ID NO: 458289 - DNA, 322 bp, Sorghum bicolor
  unsure (1)..(322): unsure at all n locations
cgtccgcccacgcgtccgnaaaaaaaaaatatatatataagagcaatgaaaacgcataccaatgctaataagcataaacgaaaaatacaactttgggcatacggtatgctaaatggctacaacacctaggggggcgcccttataaaggacccaactttacttactgctccttcaaacgacagagatctactattgggtcccctaaagcaaattaacgggccgtcatttaacaccgatgggcctaggaaaacctgtgattaccccaatttaatagccttctgggaaaatccccttttacacaggtggataaatacctaaaagg

SEQ ID NO: 458290 - DNA, 409 bp, Sorghum bicolor
cgtccgatcttcgtgttttaggagaacaagagcgctggaatattggtgtccttcttcgaatgttgactgagttgctaccatttattcatcagaaagctatacagacttgtccctttgcatcagtcaatccgagttctacaccagaaaacttctcagcatcctgcctaaaatcatatgcagcaggtgactcagagtggtcagcatttgagtggatgcacactgattgcctgccgaatttgatcaagcttgcctgcttgttgcctgtgaaagaagataacttaagaaccattatcacaaagtacctcttggaagtatctggactctatggcaaagattatctggagcacattatgctacctgtatttcttgtagcagctggtgatattgatagtggcgattttacctattt

SEQ ID NO: 458291 - DNA, 290 bp, Sorghum bicolor
cgtccggttcacctccctttctccactccactgcccgtcgctctcccccgcatcccatcgcgacccaaccccgcgcccgccccggacacggccggtgcggtgcgcgtctccactgatccgcacgatcgcgcgctagctagcacgcccgcgccccggccccggccccgggccgggagagcagcaagcatctcagcagctgcgtcggccggcgtgtgcatggatccctcggggccagccgccgggccgtcgtcctcggccggctagggggcgtgcgacaactacgcgcacgc

SEQ ID NO: 458292 - DNA, 421 bp, Sorghum bicolor
cgtccggtaatggacaatcctcccatggatggtatattgcatctcctcatggagtccaatgtctcagctatgcctaaaaccgagaggtggctttcttttaaaccttatgtcctctagcaccacgttggggcacacctgaactacccaatgcatgcttatatgagcaaaaaacctcatggaaaatgctccaagctggctcaacaggcatttgctccattagctgcttgtttgcctcgcgatgtacatattgtgaacctgaaagttcctcaggctgtaagatttcctcacaccgaagcagcagaaccaagatttgctgttctgttgcacaggagacgctgggacacatcatactgtaaaaggggtggactgcactgtacaacagttggggaagtaccactaaatcttttctacatgttcaaag

SEQ ID NO: 458293 - DNA, 112 bp, Sorghum bicolor
tacctctgctattttgacaccaaaaaccaatacacttaccacggcctgtactattttctgactaagaaacccctggccccacccaacttaatcaacttgcatcacatcccct

SEQ ID NO: 458294 - DNA, 426 bp, Sorghum bicolor
tcccggtcgaccacgcgtccgctacattattcattatgcagagcacacttgatcctcttctagcactggttgctcttgcttttagctggtggttatgctctttgttgactgcaaagaaagttcagaagacaatgacccagaaacaaaagcaatcaaaggttctttctgagcaaatgcttactcaaggattgcccaacagtcctaaaatccagttcttaagtccatctaagataggctttggaagaaccacatctagaagttccgccacacagtacggtcggagcaatttggctaatggaggtctgatctgctcagcacttacaaagcgcgtagtacccaacgaagacgacgaagatcactactccaccttccacaacatccagccacggaaatattccaaggaggaatgggaggacttcacccaga

SEQ ID NO: 458295 - DNA, 335 bp, Sorghum bicolor
  unsure (1)..(335): unsure at all n locations
agaggagagcgagacctgtgctagaggctgcctngtagagaccgtttagtttttaactgcaaaggagggagaggcggtggggagggtcgtntctatcaggcaagactgtcacaccctcaccgttcactaagaaggcacccacagcagcgctcaagattcgtgagaaggacggcaactgtgcgctccacgctgtatgcgagctcgaaagcatgaaaaatggcaacgctcatacgaacaagagccgcgtgcagcggtacatccctcaacaccaagagtcttgacgacaactcggaaaacctcgcatatgagcgagtgtcatgtgaccgcgagaaaaa

SEQ ID NO: 458296 - DNA, 331 bp, Sorghum bicolor
cgtccgaaaaaaaaaaaaaaaaaaaaaaaaaaaaaaaaagaaaaaaaaaacaaaaaaaaaaaataaccaaaaaaaaacacaaacacaaataaccgggactaggtaaacactaaaaacactcagcaacagcacaaaacataaacaacggggggctctcctccggccttaaaaatttttccccacatggaacaaactccctttttgttcaaaaacaaaaatttccaacatacctgaccccaaataccccccactggtttgactctaaaggccttcttttccctctttaaaaacccacccgttaccaaggctttatttcttgggtgcatatttt

SEQ ID NO: 458297 - DNA, 425 bp, Sorghum bicolor
  unsure (1)..(425): unsure at all n locations
cgaccacgcgtccggcaggcggaaggtcatggaagcaacactctggtggtgatggggggtcaagaggacatagagtccctgcaggtccacgtggagtctgctggacataccttgaaaaagggaactgccggaaagttgactgcagattcgaacatccaacaaacacagagggatatccatccaggcctgatcggcactacggtaggcagcattcgggcaacgagaggcgatatgagaatcacaatgagagaaatgatcgacagnttgataggcagcncttcggataatgaaaggcaccatgataggcctgatgacatgcatggtggcagggatgacgataggcatgatgacaggcaggctgataggtctcagtcaggagaggccgcgtagaactggtttctgttcttacctttcgtttgttgatg

SEQ ID NO: 458298 - DNA, 146 bp, Sorghum bicolor
cgtccgcggacgcgtgggcgcgccggccgccgcctccaccgattgatcgatcgccgggaaactgacctctgccgtgctgagttcggagccttcgtcgcgatgttggagccggaggagacagaagcgggggcgcgggccacataatt

SEQ ID NO: 458299 - DNA, 225 bp, Sorghum bicolor
cgtccggctggcctatgtgatcttctgcgtgtcccgagcggcggctcaatccgagccttcgcggagttcttctcagctgctgctcgtgagagtggctctcgagatctctatctcgatctagagagagcgaacaaggatcatcagccttgctaccagagctagagaaacagggcagaacgagcttgttgcttcagagcaacagtgcgaagaccctgagatcaatgc

SEQ ID NO: 458300 - DNA, 76 bp, Sorghum bicolor
  unsure (1)..(76): unsure at all n locations
ccggcgaccacgcgtgcgagcgaagcaagcaacggccggagccggatcgaaggccctcgccgnggtcgccgtcctg

SEQ ID NO: 458301 - DNA, 354 bp, Sorghum bicolor
cgtccggacccacgcgtccggctagagcagaaaaacacagaaactttggagaaacatcggcttctggaagaggaaaagttatctgcgaacaaggagaatattaagctacaaaagcatgtccaagaccttgaagttcagctccagctagcaaagcagaagattaaagttaccgaagcagaaagcaaatgcaaagaagagagatatgcagcaacagcggaagcgttgcgggcagagatctgtcatcttgaacaatcagtacagcagttttcaaggagaatcagcttgctggaagggacttttctgcaaaataaagggcatgctgaaataagggtctttaaaagggccttccaaatg

SEQ ID NO: 458302 - DNA, 170 bp, Sorghum bicolor
  unsure (1)..(170): unsure at all n locations
tgccgcatcgctncgccatggccgcgggtcccggcgcggggcgttccgccgttcggggcgggcccgaatcgagcctggagggagctgttcgtgctgattcctgcggggtcctgtggtgtggctcggacttctgggcccgcngagtgggaaaggttttgactcctgttggg

SEQ ID NO: 458303 - DNA, 320 bp, Sorghum bicolor
tcccgggtcggacccgcgtccgcgtagaactcatgccgagaattagcgccacagcctcggtggtcgcgtccgtcgcacgctggcgagtggaggcgtatctccgttccttcagcactggtagacgcggaatcgtagccctgactcggatctagtagggggcctggccttagcgcgacggagaccctggagtggcccctgcggctggggcggcccatgaagggaaaccctaaccgaagcccgggcaggacccttagcaactcctcaggcaggtcgggggcttctaccaggacaagcgctaccttaccatgcaggggggccac

SEQ ID NO: 458304 - DNA, 229 bp, Sorghum bicolor
cgactcacgcgtgcggcgagtgttaattcctcggaccgtgggatggtccgaaatttaatccgggacttgataaggaatgcttttccaaagggaatgcaaagggaggacctttttgatgtgttggagaagggccctttattagggcgggaccccggttcaggaaaagtggttgatttttttggccgaataaaataaaaatttcttggacttcttaggttcctaagggcct

SEQ ID NO: 458305 - DNA, 410 bp, Sorghum bicolor
  unsure (1)..(410): unsure at all n locations
gtcgacccacgtccgcacgcgctcgcacccgagcccccgatccaattggggtcctaaggcacctggcgtacgtgcaggacggtgcaccagcatccactcctgtgcagcggtcgcggatctgggtgtcctccgccagggacgactaccaccacggcgtctcgtccaccgctccgccgacctcttctcctcttcaccgcctccgccgaaagccggccgcgtgccgtgcccgtagtgcacctgcacctcgatcgtccttggagctggaggaggacgaccatgattgcaaaagagcttggtgttgttgctcatggactcttggagttcttgcactccttggcttctccttccgaccactccccctctgttctaatcatggtttgcaaggccatgacatggtacanagctctcgt

SEQ ID NO: 458306 - DNA, 531 bp, Sorghum bicolor
  unsure (1)..(531): unsure at all n locations
ccgggtcggacccgcgtccgcccacgcgtccgctcatctggtgtgtcgtcgtctccgctcccgctgtgctccaccactccccgcttcaaaacagccaaaccggaacaaagattctccgtccaatcctcgccccaaccctagccccggcgatctcgcatggccaccggcccgcgatctctccacgctctcctcggcggcggcgcagtcgccgacttgctgctgtggcggcggaggaacgcctcggcggcggccgtggtgggcgccaccgcggtctggttcgtcttcgagcgcgcgggctacagcttcccctccgtcctgtccaacgccttgctcctcctcgtcgccatcctcttcttctgggccaagtccgcgtcgctgctcaacaggcctcttccacctcttcctaatcttgaggtttcagatgcaattgttgaaaaagctgcagatcatgctctngtatggatcaataggctgctggctgttggtcaagacatcgccatcaagagagataggaaagttttataaaggtga

SEQ ID NO: 458307 - DNA, 349 bp, Sorghum bicolor
cgcgtccggcgcgcccgccaccgacccccactgtccgcggggcgatcaccgaccgaccccatccaccttcttccctcgctcgcatggcgatgctgctccgcagggtgtggggctccgtgctcgcgcgcgccgcggcgccgggggccgacccgccgccggggtcaccgagggcccgccgcgcgcaggcgcagcgcgtggagcagtaccagtaccacggctcgctgtcgctgggcgcgctcgacgccgtccccaccgacgtgctcgcccagatcctgcgcctgctgggcccggtcgacgccgcgcgcttcaacgccgtctggcgcgcctggcgcggtcttgccttcgacaa

SEQ ID NO: 458308 - DNA, 443 bp, Sorghum bicolor
acccacgcgtccggaagatctcaagacatctatttctccagtgttgaatattccatatcgactggagcctgatgatggcactagttcagctgtcattgacatggaatatttcaagcgtttatcaattaagttccagaggttcttggttgaagcaaaatctaagaagcttggttgtttctacttatccgagagtctggatgaggatatggactacatatttagggtaccggaagcataccagcgtgacgaagtccatgacttcaatcacatgccagctgaaactgccttatattctgatggtaatcttgaaaaatacaaggacagacacttttgcctgtaccttggtcatcaagatggcgaaatgggacagtgcaatggtcctgaagcttttgcaaattattttggtctacttgactcccttccgcataatggaagcaaatcaa

SEQ ID NO: 458309 - DNA, 66 bp, Sorghum bicolor
tccggaatccgtcgaccacgcgtccggcaacttgcacttggaagctgcaaagaggtgagccttttg

SEQ ID NO: 458310 - DNA, 461 bp, Sorghum bicolor
  unsure (1)..(461): unsure at all n locations
ccggtcgacccacgtccgcagacgtttcatgggacaccatattggtttggccactgaaaactatttggatgctagaggtacctattcaagattagatggaggtaactttcagttcggcacggacaagggaagcagtgatagtgattcccatgtctcaagaacttacctttcagactatccatatcaatcgtttggcttgtctgtttcatctgatcctctccaactcggtgagaagctgtcaccatatggtggagcgacaaagactattcctaacatacatcagaaagaacatcactcattccatgcttcatacagctcacatagcttaacagggtccagaaatccttgctttgctacctctgaacgttctttcggtagcccatctcttctagcaacttctcatctgggaatacagncccatcatctgctcacatctgatattgagaactaatctagcaagc

SEQ ID NO: 458311 - DNA, 312 bp, Sorghum bicolor
acgcgtccgccccactagctagccactactagcagctaggagcgcgccgccggtctccaccgcggcggccaagaaccaaacccaacaggagtcaggcgagtcctaggtagccaagaaagctggggaacagcctgcttcctgggaggaggaggaggaggaggagggagacaaggagaaaaggggatctggacccgacgctccgatggcggtgacgggcacctccgtggccgcggcggccacgatgctggcggcggcggcggccatcttcatcaccttcgtcatctgcttctacctcttcctctgcgccaagcg

SEQ ID NO: 458312 - DNA, 136 bp, Sorghum bicolor
cgtccgccaaagtcgagaggcctccccacagtgatcggcatgagtagcacagccgaggaaaacgccggagccggcggcggcggcgcggcgcgcgtggtggtagtcgagcgtgtggtgactgtggagtacctggagg

SEQ ID NO: 458313 - DNA, 221 bp, Sorghum bicolor
  unsure (1)..(221): unsure at all n locations
ccgggcgacccacgcgtccgttctgctagcacagagagggggaggcgagatggagaggaagaaaatggcgatttgnggtgccgaggcggagaagaagagggcgatatcgggtggcgaggccgcgccggccttggcgaaggcgatggtggcggcggcgccaaaagggaaggcgatcgttccgtcgccggtccccatcagcatttgcgggctacgggaagcgc

SEQ ID NO: 458314 - DNA, 383 bp, Sorghum bicolor
gaagacacctttactggcctgatagcacagttgagagtgtggctgacatggagagcactgataaaattttaatgcgtgaacttgttcaagctttaattgacaagtataatgaggaccataatcttttcgaggatcttgcacacgaactcaaagacgttttacactaccagtcaattattgagaacctgaatttgactatcatttcaatttcaaaacaaagattaaaggggctggtccaaatgaattgagcatggacaatcttttctttgtggaaggtgaaattatcggaaaaggaaagcttatagaactgcaggctaactgtttctgcgcagataatccggatgacaatggtccctgctttgggtgcaccaaacatggagatg

SEQ ID NO: 458315 - DNA, 219 bp, Sorghum bicolor
cgtccgcgagaggtacaatggcagacgctggtgacgtctccgccgtagccgctgccggtgccgccgccgcatcggcgctgccagcgggcaacgcccagccgctggcggatcgcgtggccatcgtgactggcgcgtcgcggtgcatcgggcgcgccatcgggcgcactgtctcctagcgcgagctgtctgggacgctcggcgccacaggaccgctgcgcg

SEQ ID NO: 458316 - DNA, 121 bp, Sorghum bicolor
attccgtcgaccagcgtccggacacacacacacacacggtcgtcgtcgtcgatggcgcggggtcggcggcggtgctggtgctgtgctggcggcgggcatcatgggctggcgtcggtggcgg

SEQ ID NO: 458317 - DNA, 369 bp, Sorghum bicolor
tccgcagcaatacagatatgcctggtgatggagagatagagattgacatccaagctgtcagtgatgacatgctatttgagctgaagaaacatgtcgacaagtatttgcaagagagagagcagagccagcaggtgaaatctgagccttctgagaatgaagctgtgaatgtatctggccttagccactcatctacaaatccttgcaaaggtggtgagcctatcgaggaggatgtggatatctgtggcaatgcctcccctatcatgttagacaaagatgcacaaatcaggagtagcaagtgcggtagtccaagtagttccagcagcgactctgaatcatcttctagcgattccgactctggcagtgactttg

SEQ ID NO: 458318 - DNA, 352 bp, Sorghum bicolor
cgtccgcccaaatctccattggatatgttggagagcaattgtcagtcatgtgtggttgagacatccaatgcagtttccatcagtatgcttgtgagtgtggatgacatggagtgcagcagtaatatttcttctcaggaattcttaaagcctgtatctacctgtatttatttccctgtttgcaaggaactagttgctgctcaaaggatacaaaatgcataccgaagatatttgaacaatagaaacaggataactgctgcaattaaaatccagagccagtggcgttgctattcagtacgcaagggcttcacaaagcaagttcaggctattgtaggaatccaaacatcaataagag

SEQ ID NO: 458319 - DNA, 432 bp, Sorghum bicolor
cgtccgcccacgcgtccggaccgttttgctaatgaaagttcaggatcaaggttttctgacttctcagcctcaagcactggtgactttagaaatgatgtgctttctcctagctctcaggagacaggctacagcagtccctcagtccaccattcaagaaatgtctctgctgacaatcctcaatcccagaaataccctaatgcagcttcgcaaatagatttcaatggagttcggcgttcacagcgaacagcttcttctggaagttttggatcatttgatggtagctcagtttccaacaaatcatttgaatcaggtaacccgcctgatgcaccaacagaacagtcagcccattgtgctgtaaacaatcagacttgggcttcttccgaggcttgttcgacacaacaatatgcctcgccacccaacaatcacaacttg

SEQ ID NO: 458320 - DNA, 554 bp, Sorghum bicolor
  unsure (1)..(554): unsure at all n locations
tccgtacagattcatgcatgtctatgcattgattactaaacttataactaatttctatcctaataaattgtatgagattgttcataattcagcattatgaactgataacgcgcgcgagggcacgcgcctgctactagttgtctttaagacatgagcaaggtagtgaaaactatgtgatgaacaatgcattttttttattgacattgacactccagtatttgcttttgttttccatgttgcaatggctgtcagagagtagcacacaaaggcaaaagaaagagttgtgacaggaactgattatgcagcaacctgcaagaaagagttgtgacagaactgattatgcagcaacctacacttgatgcgtttgattaaatgcatgtttttttttacaattaagttctgatgtgcttgtagccgaatgatgtaactaggacgacttgcacatcatgctctatagtgatattctatgaacttattatatntatatttgtggcaatgttgtgggtatgtaacttcaataattgtattaattaattattacgatggtaatgaga

SEQ ID NO: 458321 - DNA, 164 bp, Sorghum bicolor
cgtccggcagacttggatttcagagtagaagggcttagcttagagatagcagaggggatatatctcttctagttgaataacttaagaactaaaatcagtgcatccttgtttggtgcatttatttctatagaaaaataaatggatgccttcttgctatggacttt

SEQ ID NO: 458322 - DNA, 252 bp, Sorghum bicolor
  unsure (1)..(252): unsure at all n locations
gtcgacccccgtccgcctgccttctcagatactacttgtagagggccgggccggcgagggaggagaaagagagcgactcgctgcgtgcttaattagacgaccctagctaatttgcaaggcaggccaagagaggaaaggaattaggctccaaagttcgcagcgcattcaccaccagctncactcccaactcccgctgatctaacgctcaccaccagcctcgcccacatcttctctgactataacagattcaca

SEQ ID NO: 458323 - DNA, 130 bp, Sorghum bicolor
cacgcgtccgcggacgcgtgggctattccaagtcatgagcctccacatgagcaggctgtggaatccatatgctagatgtggcggtaggtagtactatcgtaactggtctgcaggatgattcgagggcaat

SEQ ID NO: 458324 - DNA, 585 bp, Sorghum bicolor
  unsure (1)..(585): unsure at all n locations
ttcccggcgaccacgcgtncggagaagcacaggaggtactggatacctctgataccacgagcaaggacaatgaggaacaaacagtcactgctgatgaaccaaaagaaaagaagcaacgtgtggaagaccctccagtttctgagcaaactgtgcaaaaagagactactgatgaaccaaagaggtccattgataaaccaaaagaacccagtgaaaaaaatattgatgatttaattgatgaggacctgaaagaaataggggacaggaaaaagaggctcttttcaagccttgagtctggctgcaatggatgcatattcattcaaatgcataaaagagcaggagaccctggtccagttgagattgtacaaaacatgatgtcatctgctgctttgactcgtaaacatatgtcaagatttattctgcgagttttgcctgctgaggtgacatgctatgcatccgaagaggaaataacaaaggcaattagtccccttgttgaaaaatacttcccaaaagaatgcccttcaggccataagtttgcgggttatatgaagcanggtcaaacacaggaatngatagaatgaaaatcat

SEQ ID NO: 458325 - DNA, 74 bp, Sorghum bicolor
cacttgtttgactctatactgcttcttgcaaaaagtgtggaatctttcttcaacttgaattaagtgttagaaat

SEQ ID NO: 458326 - DNA, 353 bp, Sorghum bicolor
cgtccgcacaccacttcttggctctcgcacactcctgccgccaccacctggtccgtccacgtcgccggcggcaatgtcggcgcacctggccgtcgcgctgttcctcgcgttagccgtcgttccgtcggcccgcggctccgacgtgccgtcgttcccgctgtcgcaggcgcagtccccgtccaactcctcgtccccgtccaactcctgctcgccgccgtgccacctcgacctatccgccgagctcttcggtggcgtggccgaagcgtgcggagccggcggcggccccgcttcgctagaccgtggccattgctgatgggtactggaaccccccctgtacggggcccatactcgca

SEQ ID NO: 458327 - DNA, 566 bp, Sorghum bicolor
  unsure (1)..(566): unsure at all n locations
cgtccgaaacccttctccagtcctgctcactcccgtctccgagcgccgccgccaccagcgccagcgccgacgcgcgagaaacaggaggaagaagaggctagccgatccagctgctatggcgggcgggggcctgcttgggggcgcgttctgggcgacgcgggcgctggaggtggtcaagcggaatgattccccgggcctgctgtggaagcgcatcaagctgacaaccacccgcaagaacaacgccaagaagcgcctcaagcgactctggcagaatgaggcggttataagggcttgtggtgaatcagaatctgtgtcagcatcaaacacggcttctacggctgagaaacaacagtagcttggagctgaatacaaaactggagcaggtcctatgacttttgcacgattggctgaagcctgaactatcccccccagtattttgagtttgctgtcctcagattgaaagccaagtgcgtgtataaatcttactttcttcttccagaggacatcattgcttgctaccgcatgcanaccttgccccctctgctaacatcagttcctagcatcta

SEQ ID NO: 458328 - DNA, 523 bp, Sorghum bicolor
cgtccggacgcaacatagaaacgtgtcgaccgccgtttgctatttcccatggtcgtctgagagccgtgggcacgggaacaggcatcgcggatccgccaaaatcacacctgctagctcgtcctccgtgccaatctcttcctgtgccagtgaggcggcacgacttgctgcctgcatcgagcccaagacatggaacagcctgaggagaaccatgtattcccaagctgcgatgcctactttcaagctatacagcccaagaagatgttgccactgtctttacacgaatagcttactgctgcctacgcccagattcccgtatcatcctttcctgaggttccaactggtcgagtcatggaaatttccggtgatacttctgttcttgactctgcatggactgtctgtgaacagaacataacggcagcaccagtgctcaatccagaacctggggctcctactgattggcaggggaggttcctaggtgtcatcgattactcagcaatcatacgttgcgcactagaaaatgctg

SEQ ID NO: 458329 - DNA, 500 bp, Sorghum bicolor
cgtccgcgtctccctcttgatatgggcagcgacgacagcgcccttgcggcacgcgcccccacggtggccgtcccccgactgccacggagcggcgcgaccggacgccactgcttgccgtaggctcggctcctcccggagtgcctccttccgccggtgggcgtgcgctcgatgaaaccctacctgcatcttcctcgccgccaccggcggtggctcggctgcatctggcggtgcattcaatcagatagcaagcaaaaagtgaaaaagagtggacaggtgaacaacttttgtttgaaatgcttctttattttttgttcatatccagtttggtttacctacacgttacacagcaattcttgtgaattttatatatttcttgtattaggactagttctattgactgaactaattagacacaaccccctcctaattagatgactttaaactaaaacattattagtccggcagtatgcaatattgattcttctttttttatctccatg

SEQ ID NO: 458330 - DNA, 360 bp, Sorghum bicolor
cgtccggccatcctcaatgattctttcaccgtctacgatgatgatgcatgcaagcagcaagaatatatccaagtatataataatactgatatacagtaagtaatactcctacatatcagatttacagtaatttgtggatgttgagtcccaccatgtatgcaagctccatgctgttgagatgttggagcgtgagggggccatcagaatccccatgctggtgcttcagtgccatctccagctgaaccgactgcatgtacatacatacttttgcatttaattaatttgcatcaagaacacagattcagattctacgttacattcatttggactgactgacccacccacaccgtacccttaagg

SEQ ID NO: 458331 - DNA, 478 bp, Sorghum bicolor
cgtccgcccacgcgtacgccagatctcacatggaccaggcctcgaccgctgacccagccgcctactgatcggactccgtctccccatcgaggtgcggctatgaagaggcgtacgtagcagattcacagtcaggggacgatgtcgagacgcagcatgactccacgccgcaggccggggagatgtagcagcgtgcgcgggccataataatccccatgctggcgcttcagcgccatgtccagctgaaccgactgcatgtacatacatacttaggcatttaattaatttgcatcaagaacacatattcaaattctacgttacattcatttgaactgactgacccacccacaccgtacccttaaggattcttggaagtctttgttgtcaggcaggtactggaccatccatataattacgcttgctgtcgcaatctggcctgttattctttatatatataataagagaagatgcacaagcaaac

SEQ ID NO: 458332 - DNA, 505 bp, Sorghum bicolor
cgtccgtggaggggtgcaactgcttctacctttcctaacagaaaagaatgtggatatcaaaattgctgcgttgcacttaatgttccatctatcgaaagattcttctcaagaattggctgaacagttcagggagacccatctagatatcttggtaaagatcatctcatctcctacttctcgagatgagaaggctgcagctgttggtatcctaagcaacctcccagtgacagataagaaggtaactgagattctgatgcggtcaaacttgcttcctattctgatcaccttgtttgaagcaaacatcgccacttccgtgacacctcaaaggatgtggtgcttgagggcattgccgggtatttattcggttcacagttacctgggacaggaaactacagagttcacagttggatattggggggtccttgccttgttaagttgctttcaagaagacagtggacgccagtctaaagcgcaacaaccttggcccactatcacagagcacaat

SEQ ID NO: 458333 - DNA, 409 bp, Sorghum bicolor
  unsure (1)..(409): unsure at all n locations
cgtccggttcctctcccgtggcaacgactgggcgacgcttccgccgccgccgccgcctcctcctcctacgcagattcccagttcttcgccggtcccttcgccgcgaaagagcaaccactaggctaaatctgcgagcggggcatctccatcaagtgactggtgctaattatgcgatcttcatgggctgactcagttgcgaacgccgaggaatcggcgcccgcgactgctgctgctgctaacggctctgttgtgactcatggcaactcgcgccccacgcgcagctcctacgtgcctnctcacctncgcggccggccagctggtgccggcgttgacacccaagcgggcctagtagcaccggcacaaggtggaccactgccctcggctgccgcacaaccttctggtcagggcg

SEQ ID NO: 458334 - DNA, 477 bp, Sorghum bicolor
  unsure (1)..(477): unsure at all n locations
cgtccgcccacgcgtccgcccacgcgtccgggcaaacggaatcgcgcctcccatcctctgctttccccaaaggccagctccctccaccgcggcgccaccgctcctataaaccatcagctccccgtaggcgcgctttcaccgcgacgacagcgtgagcagccatgccggggcggcgggcgatcgaggtccggctgctgcctggcggcggcgacgccgcggcgcccaggtggcgcatgtcgctgctggagaacacgttcagcgggttcctcctgcagggcgccggcgccggcgccgacgccgcagcgagggccgtgttcgtgggagggtccctgttcagcccgttcctgttcggcaagttcttcgacccggccgacccgttcccgctgtggagttcgagtccgtcgtgctgctcgccgcgctccgncgcggcaacgccaggaccaccgtcgactgggccgagaccgactncgagtacta

SEQ ID NO: 458335 - DNA, 404 bp, Sorghum bicolor
cgtccgggagcccgtgtctgtcgaggaaacccagctccaccaccaggccgccatttccgtcgaggttggcacttcacagacgagctccgagcctagtagcggcattcatccggcggcggccaccgacggcagctcaagcccgccggtgacggtggtgctggacacggccggcgacgtgccgtggatgcggtgcgtgccgtgcaccttcgcgcagtgcgccgactacgacccgacgaggtcgagcacctactccgcctttccctgcaactcctccgcgtgcaagcagctcggccgctacgccaacggctgcgacgccaacgggcagtgccagtacatggtcgtcaccgctggcgactcgttcaccacgtcggggacgtaccagctccacgtgctcaccatcaact

SEQ ID NO: 458336 - DNA, 230 bp, Sorghum bicolor
cgtccgtttgcctcggcatattcgcccgcagccgcgcgccggtgccggtacgctggtggtgaggcgcccgcggcccgccccatgtcaccaccatgtgtggtgggctggtggcggtggtggccgtgctgctggtgcgggccgcgccggtgcagccatcggtggcgcccggcgctgccataccctgcgtgaacccattttctggctgcctgcttgtcttttttttggggggc

SEQ ID NO: 458337 - DNA, 586 bp, Sorghum bicolor
  unsure (1)..(586): unsure at all n locations
cgtccgcttgtgttcttgttgttcttgctttgttcttcgtgttcttcgtgttcttaagataggatgaatcgcaaagttggaggagcacttaggagcatcggaggacactctcattccgcagcatccagagccggtcatcatctcaagcaccttcacgtgtcggttccgggatggacatcgattcgctatcatcttccgagcatcacacctcgtcatcctcttcccaatgggaagagagttttactttggcaggtgtccatcagcatgcatcagcaggctgtccagaattgtttacactggagctgacccagcaccatcgggtccagctcatttttattatacttaatgatccaggtgcgtcacatgagccacatcagccatggtccacccactcaggatgggaggaccaagccacgtacgagcaaggagagtcgtctacatccacaggatggggaacattcctcacataggagccagataagaccaggcaaaattttcaagaggggtcgtgcatcattttctgtgcgcggaaatgcggaccacaccactggtggaccatacncgttccatgcaccaccagtagatg

SEQ ID NO: 458338 - DNA, 510 bp, Sorghum bicolor
  unsure (1)..(510): unsure at all n locations
cgtccggtcgaggtagccgacattaaaaggctgaacggcctctcaactgacctccagatgtttgcacacaagacactgcggattccactcccggggaggcaccctccgtcgtcttaccaggagaatggttcatatgagagtgacgacagggaatgtactccacgccgcattcacgaagatatcttggattcaattttgaaaacaccaaagcccaaagtttcgccagctatgagtcttctgcagggatactatggccttgcaccacctccaaagagagatcaaacaagtgaaggcactgaaatggcagtttacagtaaaggcaaatctgcttttttggatgttgagccgtggctggagccaccaaattccgacccattccctcttcagaataggaaaaccagaagctngatgataggttcttctcttgacggtgatactgatgagaatggtgacagtgaaaggttcataaggcggcgccagaaagcttgatggtgagctgtaccgagggag

SEQ ID NO: 458339 - DNA, 511 bp, Sorghum bicolor
cgtccggacagacctatgtacaggagataagctagtccgatggagaggagatgaacatattaggcatgagtgcatggagacatgtggactgtaattttaatatacacatatttatgtagcaagacgtctgatgcatccttttttagctcagcttcttttatgttaggatgtgtagataaagagtatgaatgaaaacttcagttctagaacacctgcccaggaacaggtattggctcagttgtattccttctaaaaatttattgattcattgtatttcttctaaatttataaattcataggaagatcacatattttcctaaatatgttcttaatgaagcactctacattttcacacaggacaaatatgatgtgttggatgttcagatcagatgcttgaaggatgaagaacaagattcccctcaagattagtttcctcaggattagttttttaggagtggtgttacagtactgtatagttatttttaagatatgaattttttaggtagtgaat

SEQ ID NO: 458340 - DNA, 567 bp, Sorghum bicolor
  unsure (1)..(567): unsure at all n locations
cgtccgggacccgctccgaacgcttcgcctactcggttatgccgtcgccgtcacgcgcgcccaccacgtcggcgccggtgaagaagaggtcactgttcaccggcttgctgtcttcgccgttcagcaaggcgtctctgaagcagacgtcgccgagcaagccggtggccagcgcgttcaggaggacggccagcccaaccccggcccggcgctctaccgaggtgcctgcctccgccgggaacacgctgttcaaggcttcttctggcggatgcggcgtggacggtgacatgaagttcaagctcccggtgccggcggcgatcaagtccgaggatgagcaccagctgagactactctacaccagggagttgcagtggcggctcgtgaacgcgcagcttggagctgcgatttcgncgcagaccatgggtgcagagaaaaagtgtgtggcgcaatggatttaatcctgaggatgcgcaaatctgtcgccattagaaagatgcagcttcagttgcttcgaaacaactgcaaactcatggcaattctgagaggacagatgncataccctggaagaat

SEQ ID NO: 458341 - DNA, 447 bp, Sorghum bicolor
tcgaccacgcgtccgcccacgcgtccgggctcgcccgggtagtagtgccgctgctcccctcctcctgctgctcgccgccgcggcggcgtcgatcctggcagcggcagccgcgtcgccggcgccgagcgacttcgtccgcaagtcgtgccgcgcgacgcagtacccgtcggtgtgcgagcagagcctggcgtcgtacgggggctccccggcgccgcggagcccgcgggagctggcgcgcgccgcgctgtcggtgagcgcggaccgcgcgcgcgccgtgtcggcctacgtgggccgactgtgcggcggatccagcagatccgtcggccacaagaagggctgctgctgagaggaagggtcggtgccaggactcaaactgttccaggactgtcatcgtcaagtagatgctgccacattcaaacattttacctcactcactaagatttgaca

SEQ ID NO: 458342 - DNA, 547 bp, Sorghum bicolor
  unsure (1)..(547): unsure at all n locations
cgtccgcgcattcccctgcctcgcgctcccatcgctgtcctcacccccccccctccccgcctatttaccgcccgtgtcgccccccgccgcacgccttccgagcccccgtgcctgcctgctctctgacgccggggggcccccacgacgacccgcccccgcccccgcgcggtgacagcaagccgggacatggcgcgcggcggcggcggcagcctcgcccacctgctcgccacgctcctcctcttcctcctgctcgccacgccactcgccgtcggagcttccgaggcagaggtggacctcgcgccggcagagggcgtgtccgaggcggtggcgccagacgcggacgcgcagcagcagcacctcctgccgcggccgttcgtcatcgagctcccgtcggcgagggccgcggagcccgacgccggacccgtgccgaaccgcgtccgctgcgccagctggcggntcgncgcgaggccaacaacctcgcgccaatgaaagggggccgnccgaatgcggccgacgtgcgggactacgtacggcgccgctacccgtc

SEQ ID NO: 458343 - DNA, 548 bp, Sorghum bicolor
cgtccgccaccaccgcatttcttcaggctcctgtccccgccgccgccgtcgccgtccggtcctctatggacgggatgcagccaggaggaggcggcggccacggatactccgcgcatggagatggaagcaagaggtcctcctcgccgccgggaggctaccgctccggccagggtccatcggcgccgcggtgcccgaagtgtttgaagatggagaagaggtttctgaaattggagaagcagattaagaagctgaagctgagacagttttatttgggcaagaaagtgtgggtgcatggcagcaagctctatgacttatagatggagcctgtcgacaagccagaggccaagaaggtgctggtggtgattgatgattaagatgcttgatgctgcctaatgaagatggaactgcagtgtgcatggtgggatgtgtcttttggttctgtcttttggaaagtcttagatggaactgcagtgcatgctaggatgtgtcttttggtctgtcttttggaattcttagatggaactgcagtgcatgattagatgggtatc

SEQ ID NO: 458344 - DNA, 530 bp, Sorghum bicolor
  unsure (1)..(530): unsure at all n locations
cgtccgcccacgcgtccgggtgaattgaatgctgatttgaattacttatgctatctattgtttgtttcttgtaggtccatgacattgttgcagctgcttgtgtccatctctatctcaggtaagcaacacaacattggtggcgagtagcagtagagccaactcattttagtttcagctttgagttatttgttagattcataggagaaggccaacagttttagatttacagcagaacctgtctttgcatattaactgctctgttcattgacataagtttgtgacttgcctactcacatgaaccttcgttacatatcaaccatcatttcataatcatttaattattactagctgcttattttgaactgatgttgcttgtctcagttttgcattgaatttttttctttgtcgagtgtgctctttttcatatgcagtctgtatgcacatatgagtatntaattcactggaattttataaatctgacagatgcctggatctgaacttttataaaccccaagatggattatctgtta

SEQ ID NO: 458345 - DNA, 347 bp, Sorghum bicolor
gacccactcgtgcgcacaacacagcagcacatccttcaacaaggcaaaaaaaccagacctcctcacaacagaagacatcatgggcctattcattagtgggaggcgtcttattttaaagcgtctgacgatcacttacctgatgtaagaccacattgtcataaacctaccacaatacattaactcacgcgacttttgtccatgccaatcctttcacaccgcacagagatacacatctatacgcaacaacctctcaatcacacccccaaaatccaccctaactggtcccgaatataaaacttacgctgactactacatagatcacgaatacacatgcccaaacagaactc

SEQ ID NO: 458346 - DNA, 414 bp, Sorghum bicolor
cgtccgcactccaagctcccgctcgctcgcagagtcgcaggcccggagctcctgccaccagaagccaccatgggcctctgcttcagcaagaagaagccaccggccaagcccgggaagatcgccgtggcggtgtccgacgacaaggccaagaagccggcgccgcagcccaagagggcggcggcgggggaggccgcggcggcgacggcgaacaaggctgccgcggtgttcgtggtgaggccggggtcgtcggcggcggcggcgcccggggaggatccgaagaagaagcggtcgtcggggtcgtcgcaagagccgcagccagcgccgaagcagctgccggtggtgctggtgccctcgacgcccgtgcgtagctccagctgcaccaagggaggggtggacgcgatcctgatccagtgc

SEQ ID NO: 458347 - DNA, 493 bp, Sorghum bicolor
cgtccgcacaatctccaggacatccttcaacagtggaaaaaaaccaggaccatgaagatagtaaacattctggtcccagtgatgaatcagagccaaatcagcttagagagtctgccggagacttacctgatggtagtgcatcttcttcgtcgcctaccaaaatagataaatcaagtgacaccgaaacaggggaatctattcatacaggaaaggaagacacatctgatgggaacgcctctcagtcacaaccagcagaatccacgctagctagtccagataatataactgaagctgacgacaagattgctcaagaatatgatgccccaaaagaactcagtagcccacaggagaatagcgatacagtagacagagttactcatcttgaagtcaaattacatgatggcaatattaatactgaaaaaagtgaggatgaaaggaataagatggaggcaggggaagcatctgttgtgtacaggaggataatgtaatggag

SEQ ID NO: 458348 - DNA, 586 bp, Sorghum bicolor
cgtccggtatgaggaaggggtcattagttgctgcttgctcggttttgaagctattgttgttctctcttctatgcatatgtaatggtagcaccttgccaatagccggtttggttgctacaaacaaaaaggggatgttcttaagaagttggaggcctctgtgttggtgctcagccagtggatgccatctccttgttgctagctaaactggaattctttagcctttgattcaaaggccacctatgcaatatttaattgagttcctaccagtttgatagccattttcaccaggattgttagatttcctttcaggttcctaattctacctacactaatgtgttcacacattgatgcaccgacataatactctctatctttccttccaattacgtggatcagcataacagacttggcatcctatcattaaggtgacaacggcaaaaaaggccaacaaagtcatcatacaaataggctcccattaacgtgcaagcctaagtgattccaggtagagcataaccagtcaactcaacaacaagatgatgatatcttctctgagcctcatcaagtgcactgcttacaaagtgttatc

SEQ ID NO: 458349 - DNA, 467 bp, Sorghum bicolor
  unsure (1)..(467): unsure at all n locations
acgcgccgcgggctacctgcagtagaacggccaccgactccgtatgtgcgaccacacgctccgcggcgaggccgacggatatgaaggacgcgctgctggcgtgcttcaagatcgccttcgcgtgctgcgccatggccatcagtaaggcgctcttctttaaggaccgcactgaggttgttcaaccaaacaacggccgcctccgccacaagcggaagtgccgccgccgttccttgaggggaacgaaaaaaaaaactgaccttgtagtgagtgcttgtagtcgttactgatcacaataatcttactgcaagtgcaaggacggtggcggtgatcaccggcggcgagcttgtttgttagggcgtgtacgtagatctgtcactaattttggaggtactgcgactgcgagaattaattaacctactaaaaaaaaaaaaaaannnnnnnnaaaaaaanaaaaaaanaattttnta

SEQ ID NO: 458350 - DNA, 536 bp, Sorghum bicolor
cgtccggttgttttctaacctttgctcgctgtgtctctctccctttcctctctctccgtccaacgacgccgcgatccagatccagggcatcctgccgccgccgcggactgcgcctatcttccttctgcagcggcggggcatcgccgtcgtcgtcgatcatcccctgggctggatcggggcggagatccagccggaactgcggtgatcccttccttttctcgggtagtgtagtgagcgagccaatggagaggtaattcgccaggtcaggctggtatcaagttcctggttcatggtgcctggatgagcagtggaagagatgctactggccgtggaaggaggagggttcttctcgtcttcagcgtcagggtacagccatggcctcgcgctcttgctgctcgggcggaaagctgaggagaagcccgtcaaggtctcgccgtggaaccagtaccggctagtcgaccgggagaccgagcaggtgtaccagctgccctccgcggccaatgcctaggaccaggcgcctgggtaatgcgcttcct

SEQ ID NO: 458351 - DNA, 345 bp, Sorghum bicolor
cgtccggggagagggaattcaggttcagatactgagaagaaggttgcagaggatggcaacgcatctggccccaagattccaccaaggccacatgggaatcggctagagagtttccggcaacagttccaccatttgcggcccatatctagaaggtttggtgacacacatgggcttttgtctacgtggaggcgcatttttgatcagcatttggtgaatagcatgagtagacttgaagcgcctcctgaaccatctgtctcggaaactgctcagcatgcaagccgtttgggccgaatgactactaagttgagagcgaggaggttgcaaagggaagcggaaaaccctaca

SEQ ID NO: 458352 - DNA, 79 bp, Sorghum bicolor
ggtccggtgctcgcgcggaacacgtcgacgcagcgactcgacgcgacgcgacgacatgtaatgttttacgacgcggtgc

SEQ ID NO: 458353 - DNA, 427 bp, Sorghum bicolor
  unsure (1)..(427): unsure at all n locations
attcccgggtcctcctgtccgccccactctgtgcagtctccttctcgcgtncgcggtcggcttggcagggcggaaccaatggcggtcgacccgcggcaggtggtggcgggcttcctcaggctctccatgttcgtcatgctcggcaacatgatcaagcacgaccatttctcctcccccgtcaccgaggagctggccttggaggcaacaggtgtggagtcgaacacagtgaagcttgacaacaatgctgaaatgaacagcgtcgatatggctggagtggaggacctgatggacgctatcgaggacgttaaaccttgctggaccaaaccaagtcaaaaaaatcagccatctaatggttttgtacattctccttgactatgggccctgaatatcacatctaacagatcacagatgctgtggttgttgcaag

SEQ ID NO: 458354 - DNA, 182 bp, Sorghum bicolor
  unsure (1)..(182): unsure at all n locations
cgcgttcgcacacactcgagagcccagcacgcacacgagcacgatggcgttcaccaccaccgncaccttcctagccgtctttctcctcgtagcggcggtcgtgctctgctccagcgcggtcctgcgcaccgagcgaccttcacgcgctgctgagcgtgaagcaagcgcttggcaacccggcg

SEQ ID NO: 458355 - DNA, 85 bp, Sorghum bicolor
cgtccggtatcggtgactatatcacagtggcgttgattgaccaaagaggcatgcttctgtacatgagcaatgtcatgactacaat

SEQ ID NO: 458356 - DNA, 155 bp, Sorghum bicolor
acgcgtccgctctccctcgccccgtccgtctccggcgagctagggtttgcgttccccgcctcgccaacccacggctcccgccctccctggatctccagccatgtacggcggagacgaggtttcggcaatcgtcatagatgtgggctcctacagct

SEQ ID NO: 458357 - DNA, 369 bp, Sorghum bicolor
cgtccgtttaaacagaggaataggggttgaagaaatcaaactttatggtgctgaagaagataatgaaatgatagaagattctacagaaagtaactttgaagatcttgaaaacgtcattgcaaatatatttccaaagaagggaaaaggctatttactatcagtatctagatacgaaaggggggaaaaggctatttactgcctatcctgtttaatttctcttattgagcagtcacgataccttcagttccgtgactgtcctgtggaatggggatggtgcagggatctgcaatcctttatttttgtatttacaagccataataggatagttcttgagcgtcctgaatatggttatgcaacatacttctttga

SEQ ID NO: 458358 - DNA, 434 bp, Sorghum bicolor
  unsure (1)..(434): unsure at all n locations
cgtccgcgcaatcctatcgaaagctcgctctccaacctcgcctcctggttcctgccctgcacctagcaaccacctccggtgcttcgcatcttgcacggcaagccttcgccttggcgcgctgctgctcgcgtgccgggcttgcgccgccactgccattttcgttggcccttccctgctgatgaggccaagggcgttgcacagaggagaagcccaccagtgcatgccacattgaggagcggatctctggctgtggaggcagggaatcgctcaaggctggatctgtgaaggacgggtaactcggcatcagtgcaccggcagcctcaacaccctcgccgttggcaaggacagcaggcggattcgacgaggatgaggcccttcgattcacctatgatggncgtgctcgggcaatgggtggcgctctaatccgacacgag

SEQ ID NO: 458359 - DNA, 148 bp, Sorghum bicolor
  unsure (1)..(148): unsure at all n locations
cgtnccgnaanaaaaaaaaananannaaaaaaaaaaaaaaaaaaaaaaaaaaaaaaaaannnnnnnnnaaaaaaaaaaaaaaaaaaaaaaaaaaaacggccgcggtggaggatcaaccattattacctcctccttcctacgacataat

SEQ ID NO: 458360 - DNA, 480 bp, Sorghum bicolor
  unsure (1)..(480): unsure at all n locations
cgtccgacgctacctccgttcgctgccgctcggccgcgccggcgatggcgacgacggaggggcttgtgcccattacgcggacctacctcgcgcgctgctacgacaactacccgctgcccccactgcccgacgccaccacggacctcgccgcgcggcttcgcttcctctccgccgacctcgccgccgttgctcccatcacccctgatgaggaactcttagaacaagaagcggctggcatacctgcccacaaaatcgatgagaatttgtggaagaaccgagaacaaatggaagaaattctgttcttgattaacacatcccgtcgtcctgtggcactacaacagaagtccaccccagaagatgctcagatagtttgcacactngatgatatagaagctaaattgaaagatatgttgaagaagttagaacaaatttcaattggaaaatgctgacagtgttttcaatacaagtatgacatacatg

SEQ ID NO: 458361 - DNA, 431 bp, Sorghum bicolor
cgtccgcggacgcgtgggtcccccgtgacctctctccccttccccaaatccaatcatttgagtcgagccttctgcccctcctccgccgccaggcacaggcagcagagttgccggacgtccccagccaccacagtcctgccgccacctgccatcaccaccgtctctcagccattagcctccgctcctacccaccagacccgtcgtccctgctgccagcacgagatccagcgctcgctgcccccaggcctcggccaccaaaaaggtcgccccaagatcccaagcgcgacgtccgcattctccaggatctgagctttttgaatgtcagtttgggctgcaatgaggtgagttcttgagcttttagattcagtgaatgaagcttttcgtttcacaaaaaaagtgaaggaagcttttcacttgcaggacatggagaa

SEQ ID NO: 458362 - DNA, 370 bp, Sorghum bicolor
cgtccgcttcgctgggtggctttcatttttccttctagtgaattacaaattacctcttagaccccagacgaagagaacttactatgaatatactggcgtgtagtggcatatctatgcaattttatcaatgaatgcatggttctggagctccatcttccatactagagatattgacttgactgagaagttggactactcttcagctgttgcgctgcttggatactcgttaatcctttcattgctaaggactttcaatgtcaaggatgaggctaccagagtgatgtttgcagcccctattttggcattcgttacaactcacatcttgtatcttaacttctatgagcttgactatggatggaacatgaaagtc

SEQ ID NO: 458363 - DNA, 326 bp, Sorghum bicolor
  unsure (1)..(326): unsure at all n locations
cgtccgaaacacacagtaagggagggaaatggacaaatgatgcatctaaggctgtctatgaatctgcttgcagcaaaattgcagagaaggaaaaagagtcgaccaaatagctttattcctttggtngagagaaaccttatttttcaggaagcatacaagcaaactactagagctaaatcattcaaggttcatggtaatgggtatttggcaaggtacccaactagaaggcagctaatgactgaacgttttgaggaccaagcctgttctgaaatggcatcccatatggaaaatgaagagctgaaggctacactcgagacaagaacaac

SEQ ID NO: 458364 - DNA, 509 bp, Sorghum bicolor
  unsure (1)..(509): unsure at all n locations
cgtccggcacaatcatctacaaaaggccaaattttccgaggcagtaaaataaaggtggaagaacaagaagaatgcagcagcataagcaatgcaaggaaggaacaggaaaatgaagatctaagtcccctatctgtgcttgaaccaacctctctaagtgagagttgctggtcttctgagtgttcaggcagcagcagtgggggtaagggctattcatcactttttgatattaagaatgcccaagggaatttcttgattaacccagcatcagttgatattgaggcaaagacaacagactcagcttcttccgcatcagtagatacatcagatatttctgatgtcacccaatgttctaaaagatcaagacacacagagctggagtacattgcagatgtgctaagcggtgtcaacttgacaacagatgaactgngatcactctttgtcaatcaggatacatcagctttggaccccctnctttttgagaaaatggagaatattcatgtgtatacaca

SEQ ID NO: 458365 - DNA, 101 bp, Sorghum bicolor
cgatcgacccacgcgtccgcatatattcgacactgatatcaccataccaagcttatacacacacattgactaaggcagagccaatggtgtgtatatgtgac

SEQ ID NO: 458366 - DNA, 119 bp, Sorghum bicolor
cgtacgaggagctatgcatcagcgtgagtgtaccagctgggaaaatctcatgaacgatgaaacactcactccagaagcgcgtgcttacctacgggaggagggacacctacatgctgcca

SEQ ID NO: 458367 - DNA, 412 bp, Sorghum bicolor
cgtccgcctgaatgatattcatgctctagactgagaaacaatggtatggtcaagggtcaaaacccatggtcatcatccatcacctcgagcaggatgctgcggggctctttgtgggactaaatggtatattgcagggggtggaagcaagaaaaaacggcatcctgaaacatgggttttcgatgttctcgaatccaaatggtctgtttgtgtagtgcctcctagttcctcaatcactacaaagaaaggtttcagcatggttccattatactacagggacaagattgcgcttgttgcttttggagggaacaaaaaggaaccatctgataaggttgaagtactagtggtgctgcaaaacgagcactgtttcagttggcgatccgcacctgatgtggaacccttactgtatgacgac

SEQ ID NO: 458368 - DNA, 248 bp, Sorghum bicolor
cgtccggcttgcgacgcgttgtgtagcgtgttcaagcagctgtgcatacagagatgtatcgggagaagttacataacacattacatgacacaaagggagagatgaaggtatacatcagagtatggtctttagtgacgaatgaattacgaactgaatcatgtgcaaagagatatgcaaacagtggccaaagcatagggctgggccatgatgcacaacgttatgcacatagttattgataaacttttgat

SEQ ID NO: 458369 - DNA, 311 bp, Sorghum bicolor
cgtccgtgcagacccgcacaaaccaacgctgcgggtctttcaccaccaagcaaaaagattgtccaggcctccaggggcaggcagggcgcgcagagcaagctctagctcctctggctgcgcaccgtttgttctcggcaccgtctcctgccctttgcggcgccctccgcggcgtcgtccggccggtccgggaaccaggatggctgcggtggtggtggccgtcgaggccgcggcggtgccgagcggcgcctgcaagagcaagtcgtcgtcgtcgtacctggtgaggagcctctactggaggctgcgcgcgggcc

SEQ ID NO: 458370 - DNA, 253 bp, Sorghum bicolor
tctttactttgtgaagggcctcaaactattcattgacctgggactacgctgaattgttgtggagatgtatgcaatcgtttaccttgcttagatgaagccattgatcaaccccatcctgagcggagagtgagctctgtcttttcattaaacagaatgaaagctagacctggtggaccattattcagtctgtgaactttctattcaatttggcgcacctgatgaaataaataaactgccatgagttttttgctac

SEQ ID NO: 458371 - DNA, 88 bp, Sorghum bicolor
cgcgtccggcggcgcctgcgcggtgctgactcgatgaactgtggcaaggtcgaagaggacctgtccaggagccacctggaggaggtga

SEQ ID NO: 458372 - DNA, 571 bp, Sorghum bicolor
  unsure (1)..(571): unsure at all n locations
aaaaaaaaattttttttcccccccccccccttttttggggggggaaaaaaaaaaaaaaaaaaaaaacccggcggggttttttttttttttccccccccccccccccgggggagaaaaaatccctccggggggggtttttttttttttttttaaaaaaagggggccgccccttcccccctccccccctctttttgggggggccccccccctttttttttttctcccccccccccccccacggggggggggggggggggggggccccccacccctaaaaaaataaaccccccccccccccccccccccccnaaaaaaaaaaaaaaaaaaaaaaaaagggggggggggggggggggtgtttttttttttttttttttttttccccccccccccccccccccccccggggggggggggaaattttttttttttttttttttttttattgtttttggggggggggggggggcttccgcccaccccccccccccaacaaaaaaaaggggggggggnnccccccccccccccccctttttctctttttttttttttttttttttttnngggggggggg

SEQ ID NO: 458373 - DNA, 586 bp, Sorghum bicolor
  unsure (1)..(586): unsure at all n locations
cgtccggtccgaatcagttcccatgtccacctgaaccagagcagagagcacagccttggaattgcggccctccggcccattcctatcctgagagatatcagtatggtggacatgatagaggacaccatggatatgatagaagaccttactttgatgatagggggcaaatgcaccatgaagttatggatggtggaaggtttccctcattctttccaccaggccccccatgtccagatcactttgaagcgccgccacccaaccaatttcactgcggacgaccattagatcctccaccaggtccatgttctgggtggcctatgcctcataggagatccaagtaccctcctgattccagacactcaatggaacctccagtctccaatggaggaggttggaggacgcatggaagacgtgattatgatagataccattgatgactgactggtattagaaattntatgttggaactactgtgcttacacgttagccccattacaaatttaacttctgagatgcatgatttacttgggataagatactcgtgaagtgtggaataagagcattccccactaaggttcctacatac

SEQ ID NO: 458374 - DNA, 355 bp, Sorghum bicolor
  unsure (1)..(355): unsure at all n locations
aatcgccgccccccccccccccccaatatttttttctctccccccgcggggggggggggggccccccccaaaagaaaaaccacccccccccccgggggggggtgtggtgggggccccccccccccccccccccctttttttttaaaaaggggggggggggggggcccccccccccccccccccccttttctttttattaatatatttnctnnnggggggnaaggagaaaagnctccccctccncccttaaaaaaaaaaaaaggggggggggggggggggggggccccccccccccccccccccccccccnnnntttttttttttttgtgggtggggtgtggggggggggggaggg

SEQ ID NO: 458375 - DNA, 490 bp, Sorghum bicolor
  unsure (1)..(490): unsure at all n locations
gggggggggttttttttttttttgtgccggggggggggcggcgcgttcttttttttttttttttcgggggtggaagaaagggagagaaaaaaaaaaagggggggggggccttttttttttttttttttctcgtggaaaaaaaaacccccccccccccccccccaaaagaaaaaaaaaaaaaaaaaaataaagtggggggggggaagaaaaaaaaaaaaacccccccctttttttctctttttttttctcccccccgtgtgggaacaaaaaaaaaaaaanccnnnctttttttttttttttttttttccccccccccccccaaaaaaaaaaaaaaaaaaaaaaaccctcttctttttttttgggggggtctttttttttccccnaaaaaaataaaaaannnnnnnnnnaaaaaaaaaaaaaaaaggggggaaaaatgggggggggggggggttttcccccccccccccccccctttctttttttttttttt

SEQ ID NO: 458376 - DNA, 633 bp, Sorghum bicolor
  unsure (1)..(633): unsure at all n locations
cgtccgcccacgcgtccggatcgccggcccctcgctcggctcggctatggcggccggctccgcggcgtccctcgtcgcggcggccatctgcctcgccctcgccgtgcttgcgcctgccgttcccggaggtggtgccacattggagtcagttccagaccttgtgaaggcaatgtacctaaacattgaaagctccccttgtgtgaggctgctgaatctttctggtgaaattggctgttctaatcctggaagtgaaaaggtcattgcaccgattgtaagattcagaaaaagcagtgatcaattgattcaaccatccactattctccttcccttagatcagatgtcagatttctttctgagggtatccaatgatccagaactttaccagaaggtggctggtgtattgattgagtcaaatggtgtcaacggtgacttacaagagctgtcacctgatagaaaatttccacaagatgattttgcaccctactcaaatcacagccatgattggaatcttgctggatcaggtatcatgtggaacagatataacttccctgtatttctactttcggaagagagtacaaagactcttcanaagatttcagaaaaaaatgaggagactagccatggatatagagc

SEQ ID NO: 458377 - DNA, 525 bp, Sorghum bicolor
cgtccgcggacgcgtgggcggacgcgtgggttctgcgggaacaggttaccgctgcttgagaagacctcaggtcatcagaagtttgatcactatggaacgtatgcaaaataatgaaggtcgtacaccgtttgaagacttgacaacaccaccaatcgaggtgacaagacaacatcaaattcacaagcgcaagttgatgaacgtgtgcaacgtaaaagggaaagagaaaaagcacggcatgcatcaatgactcaaacagaaagggatgaaaaaaataaaaaaattagggaaaagtatcatcaaaaaaagacagaaactgaaatatctgctggctcaagaggtccaccacaaacaaattttaacaaccaaacatacaataaatatttattcacatatagttactttatctttgattattacgtaaataggtgttggggttgaatctaacaaggaaaacacagatgccatgagtctaaaaagggaaagggtaaaggcgcgatttatggcgatgactcaggaagaaagaaa

SEQ ID NO: 458378 - DNA, 94 bp, Sorghum bicolor
cccagcgtcggccgcaaacgcagcgactgagccagcgtcggtgcagcagcagcaaccgcggtctgtctgcgcgtgcggtgctgtctctccgcgc

SEQ ID NO: 458379 - DNA, 588 bp, Sorghum bicolor
  unsure (1)..(588): unsure at all n locations
cgtccgcaccaatcccctctcccctcctccctccaaggctcccaatccccgctatttcccgcaccggaatcccacccgatcccccgcagagtctccgtgattcaccgcgctcctctccgtggcgcgctcccctctctcgccgcggcagaatcgttcacccatcccaatccgaaccgttttttctctctctctctctctctctctctcggaccgagcatgagcatggcgttctcctgcgcgggcgcgcgcctccacggccgcaccggcgtcggcggcgccaaatgccgtcccggcgccgcggccctgctcggccggcggggcagctcctgcttccccgcgaccgcccggaggtggagcaccgccttccccaggggaatccgcgccgacctcccgccgccgcgggcgagcgcggatggcggcggcgccacctccggcccggcggcagtcgctgtccccgaagcggnggacgctactgagcaggtggccgncgcggntgcccaacctgctgttgtgctcccggagaggcttgacgtcgatgatggggctggtgggaacggcangctcccgcccgccgccggcggcggtggt

SEQ ID NO: 458380 - DNA, 545 bp, Sorghum bicolor
  unsure (1)..(545): unsure at all n locations
cgtccgctcgctcgtcaagccaccaacaaccaaatcgaattcgtctcctcctcctcctcctcctcctcgccgccgccgcctgagggcaaacaagcgagcgctcccgcggatcccccacccggcccccgccgcgcgcacacgtgaagacgacgaacccctcgtgaatggtgggagcccgcgcgacgtcccccgcctcgcagccgcagccggagaaggcctccttccgcggcttcggttgctgcatgcagggctggtaccaccgctgcatcggcctcgacccctgaacccctcgctccctccctctgcttgcttccccgctccggccgccgcttctctgatttgatttgacttgattcgattcgatcggttcccctcccgtcctggatctgttcctcgagagcacgccagcgcgcgagattccttcccttcccttctccgaggaaacaaagccgatcgctcgctgagctccgccgctgctgctgatggccgtcgcggtgccttcgtcgctgccgatgaagctctgngaggacggagccncgcggcaa

SEQ ID NO: 458381 - DNA, 641 bp, Sorghum bicolor
  unsure (1)..(641): unsure at all n locations
cgtccgggctacaggccttctcttcgttgttatgcagcctcctattaagctatcatgggtataccggtcggattttatcacagcagcacatttatctgatgatgacatttcaatatatgggtttgtagcatctaagcccacatggccgtcatggctgcttattgcaactgtggtacttacactagcagcagttacatccatcatcccagtgaagtatgttgttgagctgagggctttgtatgcagtggcagttgggattactctaggcatctacatatctgttcagtacttcttccaggcagttgttctgtatcctcttcttgttgcaacaattgtctctgcggcagtctttgtcgtattcacacatcttccttctgaatctagcacaagggttttgccatgggtgttctctttcttggtagctntgttcccagtcacctatctgcttgaaggacacttaagatccaaaagttttgcagatgaggatgaagcagagaagttcaccaacatgttggctatagaaggggctagaatgtcactnttgggtctctatgctgctatcttcatgattattgcattagaaatcaagtttgagctggctttgctattgcgtgaaaaggctgcagacagaggtatgcatg

SEQ ID NO: 458382 - DNA, 456 bp, Sorghum bicolor
aaaaaaaaaaaaaaggggggccttttttttttttttaagggggggtggttatttttttggggggtttgggggggggcaaaaaaaaatttttttgtgtttttgtgggggaggttcttttttttaaaaaaaaattttttgggggggggtcttacaaaaattttttttaaaaaaaaattggggggggggaacacaaaaaaaaaaaaaaaaagggggggtctctttttttttttgggggtggggaggaaaaggggggggggcaaaaaattaattaaaaataaaaaaggccccggcacctataaaaaaaaaaaacacccgcccgggggggcccccccccccctcttttttgtgtgtttcccccccccgtttgtgaaaaaaaaaccttttgttttataaaaaaaataaacaacaccgggggggggggaggaagggccccccccccccccccccttttttttt

SEQ ID NO: 458383 - DNA, 222 bp, Sorghum bicolor
  unsure (1)..(222): unsure at all n locations
tttttccccccccccccccccacctcttttttttttttttttttcccccccccccccccccccccccccccgccgggcggggggagggggggggngggaggatataaaaaaaaaaaaaaaaagaaaccaccccccccctccctcttttttttttttttttttttttagggggggggggggggggggaagggggggggggatttattaccccccccccccccc

SEQ ID NO: 458384 - DNA, 362 bp, Sorghum bicolor
cgtccgcccacgcgtccgggcgatggagaagcagcgggaggtgatctcgctctggaagagggccgtcctcgccaagaagaagaccaacggcgtctgctaagcagccgagccgatgcatttccggccctatgtgcgtggggggtgctgtttgctaagttgcccctattttatctgaacatctgctgaaatttgtctgagtacgtgttttttagtttttattacccctccggatgaaggctgctatgtgtcgaggttaagttttagaggacagagaattgctccggctcgatgtaatgtagcgagtgtattatatgccacccgttagtccttgcaaataatattgcgcgctgtcgctgagcacc

SEQ ID NO: 458385 - DNA, 423 bp, Sorghum bicolor
cgtccgcagaaattaagctccttgaactccaagcagcagctagcagtagcatcatcacatctcgactactagctagtttcagtcaccggccgctcacagctagctagctagctagctgcagctgctggctgctctggctgctgcttaattaaccaccagtccggccgatctgacctgagctagctactacagggctgggcgcgcgccatgattaacctgaacctgaagcagcctctcatgctgcccgcgcaccagagcaatgtcgtcgtcggctcgcgcctggcgtcgtcgccctcagcggcggccgtcagcaggcctcggaggggcggtgctggcgtgtcctcctcctcctcccgctcccggtcctcgtcccggcggcacacgcggctgccgaggatcagctgcagcgccaccgaggaggtc

SEQ ID NO: 458386 - DNA, 616 bp, Sorghum bicolor
  unsure (1)..(616): unsure at all n locations
cgtccgcggacgcgtgggcttatgaagatccagacaccagatttcctttgatcttccaccccttcaatgatgctctcaacaaggatcatgacgtgatgatggcaattatcaccccaagagccataccagtgaatttctttggtagtgggaaagcctccaatctgacctatgagttttataacccatcggcactagctcgccaactagcttttggccaactgccgattgcactctgctacgccaatgtgataaagccgagggagatcattaccaacaatctggaatggatcagggtagcccaacttccaccaaatgccgatacagatgtcgatctatcggcttggatcccggctctcttcatcactcaggcatacaaacagtggtgggaagaatggaaagaacatctgttctgcagattggctctcacataccgtggcatgatcgatccncaatacaaagttctcgataacactgtcgatggcatagcaccattggtcagcaggagctgattgagctccttccatcaggtccaatntctttgatcagcaacaacgcttcaaactctgctgctataatgcatcgaggtgtacgccttaagaagtcactacaaacgaac

SEQ ID NO: 458387 - DNA, 599 bp, Sorghum bicolor
cgtccgctcgtccccagcggcggtcggcaaaccctagaaccttagactcatcggccatactgcggttactgggcgcgggttagggcccggcctccgtctccgctcgcggcgatgccgctgttcatctccgacgaggagctccggctcctcggcggcgacacggccgccgttgccgagcgggccgacgccgccatccgtgagctccggcgccaggtggataccgtacgcgccgaggcggacgccgctgcgatcgctgccgagcagacctgcgccctcctcgagcaacggtacgcctccctctccgccgagttcgatcgctcccaggccgaggccgccgagctcaccgcggctgctgagcgccgcgctgccgagcttgcctcctctcaggcggagatacatcagcttcgatggacatcaaaggccaggatgctgatgttaatattgacacaaatgcaattaccatagaagatgagcatgtggtggcaaagtcagaggcagtaattgaatcatttgacgatgaccagaaaacagaagattcaaaggaagatgctcagcttactactgcaactgatgttgacgatgacatggaggaggggaga

SEQ ID NO: 458388 - DNA, 584 bp, Sorghum bicolor
  unsure (1)..(584): unsure at all n locations
aaaaaaaaaaaaaatatatatttttttttttaaaaaacacaaaaaaaagggaggggggctctccccccccccccccccccgggggggggggggggaaaaaaaaaaaaaaaaatttttttttgtaaaaaaaaaaaaaaaagagaggggttttttttttttttttttttttttttggggggggggccccccccccccgagagaaaaaaaaaaaaaaatttttttttttttttaaaaaaaaaaagggagggcccccccccctctcttttttttggggggggggcgccccccccccccccaaagaggagggggggggggggggcgcccccctcctttttttttttttttttatttttttgtggtgggggggggggggggggggnnttttttttttttttttttttttttcttgggggggggggggggggtgggttttttttttttttttttttttttttccccccccccccccccccccccgccaaaaaaaaaaaaaagaagtttttnnnnttttntttttatccccccccccacaccaaagagagtggtggggccccccccccccccccccccccccccgggggggg

SEQ ID NO: 458389 - DNA, 537 bp, Sorghum bicolor
  unsure (1)..(537): unsure at all n locations
gggggggccccccaaacccccccattggggggggggacacccacccccctcctggggaccccccaaaaaaaaaataatgggggggggggggggggggggggggcccctttttttaaactccgggggggggggggggggggggagaaaaaacccccccccccccccccccacaccaaggggtttttttttttgaaggagagaggaaattttttctttctctccccccccccccccccgtttttaaaaaaaaacacccctctccggggggggggggttgttattttttttttttttaaaaaaaaaaaacaaacccccacattcttttttttttttttttttntccccgcccccccccccccccccctataaataaaaaaaaaaagccccccccgccccccctctttttttttttgggggggggggggggggaaaaaaaaaaaaaaaaccccccccccccccccccccccccccggggggtttttttttttttttttttgggtgttggggggggggggggggggggggcccccccccccc

SEQ ID NO: 458390 - DNA, 557 bp, Sorghum bicolor
  unsure (1)..(557): unsure at all n locations
cgtccggttgtctcctggtgctgtgaactgtggctcgacgcatgacactggaaatatgtttccactcaacacacctgaaaatttaggagtgtgtagcgaacaaactggtgtatgcccaaaggaaagctcatttgttgcattaagagaaggttttggtgacctgggattgtccttttgggaatgtcctaggagtccccgagatgatcctacttcccagatacttgataccagtacaaaggcaacagataatccaggtgaagtggaaaactaccctgccaatgatcaacctaagcaaggcccagtttctggggcggtagaagcaaacccggtgccagtggaagatgaacatgatagcgcattgcatccttgtccatcaaatgaaagagatagtgccatgggtcttgctaacctgggagcagacactgaaacatgtgtttgatgtccattccgacaaatggacagatgtcagcattagtggctctggtgaagatttcactagtgccaaaattgcatctaagaaaaggaacaatcctggagacagaataacagctntagat

SEQ ID NO: 458391 - DNA, 569 bp, Sorghum bicolor
cgtccggccatctgtttcttttattacaaacactgcagataaggagaagtcagcatgcagttattaatccagctattacaatatttcttcgaatgggagctggaggatttggtgttcctccattaggatgtccagatggaagagtcaggtacaaatttgcatcgttttggaacagaaaccatacatttagatcattgcagcgagctgtgaagaacttccaaatgatgatagaggctgagaaacaggaacgtgctcagtctgcattacgtgcacacagtagttcaagaaaaactagcaagcaggagataaatgtcccagaagattgtgctgcattaacagggcagttacaaccttttgttaaagaagaagttttggtccctgtattcaatggaacatttccatgtacagcagaacagttctttagtattcttttgagtgatgattcaaattacataacagagtatcgaacagatcggaaggataaagatataaatctgggccaatggcacattgcagatgagtatgatggccaggtgagggaacttaattgtaaatcaatatgccatagt

SEQ ID NO: 458392 - DNA, 666 bp, Sorghum bicolor
  unsure (1)..(666): unsure at all n locations
cgtccgtcttcttgttaacccaagtagggtggagctatctagagtttcattgaaaacaaggaagtccgacaatgtcgacgatcacttcttgcacccttctgagcctcggatcggcagcgtggccggcagtctattccgccgggagaccatcaccggtggcggtggcttccctttcttcccagaggaggccccggcccctttctgtgtgttgtgcgacgagccagaaaggggatcacaacccaaagacggatttgcatccatttaacatccctgccttcgttctggtgcacccggtgccaccacgcgaggaacggtggcagctagaagaggacgccgagaaggtgaacctgtggttcgaggtgcctgggcagtcccaatatgacctcgccgtggagatcgacgaggacgtgctcgtcatcaagaagaaggtccatgtcgtcggtggggacgtgggccagaggagccctggcggcggcggcggcgtcaacgattatgctccccagagcagaaagggcggcgcggcgccagaagctagcaaggaggccgcacagcagggcggcgaggtgatctacgcccggatgctgctcccngcggngtacagcagggagggcgtggaggcggagctcaagtccgcgtgcttagggcactgtcgccaagacaaggagc

SEQ ID NO: 458393 - DNA, 582 bp, Sorghum bicolor
cgtccgcccaatgctagggctgcctgctagcgatggcgttcgcacgacgacgactaccgtgacagtccccggggcctcggagcgactcctgaccgttcctgatgcgctcccacatggggaccagagcgcgacccgaccgtttgtgaaccgccgatcgcacagtgaggaaggactgcctgcccgacctggccgagggtgccagatgactgtcagactcttgacgagctgcaggtcgcagcccgtccagaactgccgaaatgcacaaccgaacacactgacgaatatgtcacagaagatatgaaaagtcgagtcacttgatggttgacttttcaaggaacgatgcgtttacatactctggactgcataacgacatggaagctcttgagaaagatacatgcgcaagcctaggcaacgtgctgatacacagctgagcgaaggactaatagaggaccaaaatgaggagctttccacctgatcctgacagagaatcaaggccatttactcgacagcttgtggagaagcatatagaataacatacggcacggtagactaaggatagtgactactatgaattcatgagca

SEQ ID NO: 458394 - DNA, 480 bp, Sorghum bicolor
cgtccggcccatcggccggccaataagccggcagtctatggagagggctttgtagagacactagtacatacacctgatgcctgtgcgaatgactgtgaggaagacgaagatggcgttgaacatatgatggtgcatatggtgataaggcgggacgtaaagatagacgaccctgtagctaatcatgactgtcctaataacgaccatattgatggcgatgtagatggccttaaaaacgaacatcattacatagagcgtgacatgaagatgaatatgcacatgtatagtgacatcgatagtgtggtcgaagtgactgctaaaacgactgataactccaaggatcacgaagagtgtcaggatgaatgtgatctgtcactggagctgaaactgaggtcacatgacagtataccagactggatgaaccaggaggcacatccagcagcaccagcagcatgtgcaggcgccatgctaggagatatgctg

SEQ ID NO: 458395 - DNA, 477 bp, Sorghum bicolor
ccggcggtcccggcccggactttcctggttggccccacccgtccgctatgcgagagcaatggcaagaaattgatcggcctggcattcttttaatgttatccgaactgaatctactccagggttagctgagaatattagtgagcatgtgaacatgtataggataactggagatgatagggacaactggaaggatgcgagctcacattttggtgtgtacagttactgcgctgctggtaagaagattgtggccaccgggttgcgaggaagatcttggccagacttggacatgcttccatttggatggcttactgatccaagtgtaagtcagggccctcacaggaaatgtaaccttactcttgatgaacaaaaagcacagatggcactctgctcaatggctaaatcacatctcatgtatggaggagatgtgaggaatctagacgatgggacatttaacataattactgatcctgccttgtt

SEQ ID NO: 458396 - DNA, 526 bp, Sorghum bicolor
  unsure (1)..(526): unsure at all n locations
cgtccgccacccccggaaagcctgcgacgatgagggagacaatggagactgagatcaacaagatcctgaggatggcgttgcgggggcccttgacgatgacccagagcacggccagggtgacgacgaaagtgagcaccccttccgcaagggcgcctgtgtggggatccaccttgagcgaggggcccgcgagcgtgtgcttgtactgcgccggcatcagctccgatatcgccagggcgccgcccacagcgccggcggcctgcgccgggaagcggagcgcgacggagaagagggaggggctgtcgagtccggcggcataggaagcggcgaagtcggtggggttgaagctggcgccgccgagcgcgccgcagaggcggtcgaaggcgaagaggagcaccgcgaggagggacgcggtgaccaggagcgcgtagtggccgncggcgccctcctgcacccncaggcacgacgtgacggccgncgtggaagcgccgagcgcggaggcgcacagcacccacaggaacgtcaccac

SEQ ID NO: 458397 - DNA, 570 bp, Sorghum bicolor
  unsure (1)..(570): unsure at all n locations
cgtccgcccacgcgtccgcccacgcgtccggccgactagtaatcaacacgcgaaatgcatccaatcctcgccgggatcccgcagtctctccggcccgcggtgctgatcgcctcgacgtgcgccttgctcctcctcgccaccgcgctgctcctcccgcgcgcccctcctcccccgccgccgctgctgaccactgacgcctccgcctccgcctccgcctccgcctccgcctccgcctccgccgacgccgacgccgtccgcctcgacgcgcgcgtcgcgcgaaggaacggcaacgaggtgctgtggcagctgccgcggccgtcgtcgccgctgcgggccgcgctgttcgcggcgcccgggtgcaccatccgcgccaccgacttcttcgacgcctccccgggctgcccgcgctgcacggggctccccgaggagcgccgcttcacgcgcgaagcgctcagccgcgggtacgccgtcctcgccgtctccagccgcgccgagtgctggtccctcgacgacgacgccgacgccggcggcggcggcggcggcggggacggngaggatggcagcgagctc

SEQ ID NO: 458398 - DNA, 374 bp, Sorghum bicolor
cgtccgcgcacccgatcccccaaatctcctcccaaaccctctcccgacccagatcgaaacccagggactcgattcgtcgtcggaggcggccatggcgctggagtgggtggtgctgggctacgcggcgggcgcggaggccatcatgctgctgctgctgacgctgccgggcctcgacggcctgcgccggggcatgatctccgtggtgcggagcgcgctcaagcccatgatgtccgtggtgccctgctgactcttcctgctcatggacatctactggaagtacgagacgcgccccacctgcgacttcatgatggacttctggctggcggtgtactgcgtcgggtgttcaggcacgcacgtcgtcgcagggctcgagc

SEQ ID NO: 458399 - DNA, 255 bp, Sorghum bicolor
cgtccgcccacaccagggaacaagcaagcagggattgctgcctccatgatctagacgtgaggtttggtggtgccaccgtccagggcgcacgggctgtctgccctagctcggcgtgccttctacttagacgctgaatgtaggaacccgcacgaagatcaagaccgtcaagcccttactgatcggagggggactgaccgacgataaggatgcctacaggaggaagaggaaggtcaagggcgcactccagatcgacta

SEQ ID NO: 458400 - DNA, 512 bp, Sorghum bicolor
cgtccgcaaatgtgaagggatgaacctgaggagttgagcggcaatcttttatattagggtttctctattgcagcaactcagtgtcagtaatttagatttaagtactttatcttatttatttgcagaaccatgttaataacacaaaggggctgcttctttcaggcttcaaagcttattatccatcaaagaaaataaaatctcatgttccagcttctgatctttgttgaccatacaaatatgcccacattcatgttcttttgacttagcgtagtttgcaacagaactacatgcttactgcctacagttcaaattgactaggaacttttgtgctgaagctatatattcatgtttgagggcatataatggtgaatatcttctattggtgtcctaatcaatctaacacattaaaattcttttgaaccttctgctccttactacccaactttactacatttattcttgatgagggatatattcttcatatgttagtagctaagccttataatatttac

SEQ ID NO: 458401 - DNA, 543 bp, Sorghum bicolor
cgtccggttgtgaggcctggagcaagagagacaccgcttaaaggctacacctctagtcagcaggaatcaccatataccatgcaacgtgttgattcaaaaccaacagtccatggttgtgaggatgatgctcggagtaccttgacgtcaaacagatccatgacagatgatctgacaaggacgtgcaggtcagagactaactactcaaagggtgtaagtgagcacggccactttgatagcatccaggaaccggacctacagccgaattgcttctcgcgaacactcaagcttcaaaagaagctattgtcttctggcgcagcacacacaatctgtttgaggatccagccacataacaagatggacttcctgcctaagaaagaattcgatacatacttctgcgcatacgaaccttacgagcagtgttcaagatcaaattcaagagctacttacagttcaagagatgatgactttgggagcaagaattcacgctttggttcgaatctaacttgctggaggcccctaaacaatccatgttaccgaggaaag

SEQ ID NO: 458402 - DNA, 285 bp, Sorghum bicolor
cgtccgcgcaccaccaccaacctttccgatccattccagtgccgcacgcctccgcactccccgtccccgacaccacccatgacacgcaagaggcgcaagcagcacgccgtcgccgccacctagggttccgatcccctccgcatggactcgctgccgcggaagcgcaagggcggcgcgcgcgcctgctgctccctgtccggatcccgccacgacgcgcctgccgccgcccgcaaccgcaagcgcacctgtctcgagcccaatccgcgggccgagaagaagaagccc

SEQ ID NO: 458403 - DNA, 372 bp, Sorghum bicolor
cgtccgcggacgcgtgggcggacgcgtgggttctcgcactccactactcacagtcaccgccgctgccgcccactgattgtagctagagagcgcaaagggcgcaggaaggaggcgcaggcatgggcttcccttcttcctccctcgcggcggcggcgctcgtgctcctggccctgctcgccggaggaggcgagtgccgcgaggcccagttcgacgcgacggacgcggccggcgccggcgcggagaacttcaacaccagcgacgccgccgtgtactggggcccctggcagaaggcccgggccacctggtacggacagcccaacggcgccagccccaacgacaacagtggcacgtgccggttcaagctacacctac

SEQ ID NO: 458404 - DNA, 401 bp, Sorghum bicolor
cgtccgaaggaatcttgtatctaggtgctacactctaacaggacatatgcgaacgccttcgacagaaaggtacatgcacacatgcatatcgacgatgttgatactacagagccagatatcaagaaagctctataaacaaatcctgacaacaccgatgtcaagatggggtacaggaggctaaacgagaatgaaaagggttcaaaccaaggaatgccaaaatgtctggcaacatgataacacacgctgatgaagcttgaagacacttacaactatcaccaaatgaatgaggtcatctacaaaagccatgctctgttatagtcagacactcacaaggagaggcatatgtgctttccccccttagcatgttgttgaggcttgaccatcttctgagggtattgatt

SEQ ID NO: 458405 - DNA, 493 bp, Sorghum bicolor
cgtccggaatcatacgcttctggatgttagatagaaaatgttgtgacagcacctataacttcttattgatctgaacctgaattttcttattgaagtaaacaacatgatggcttgtattttagacagtcaagttgctattcatgttattttcagcatatgatgcttcctaggttattcatgttaatcaatgtgctttaaggtgtacaaattgtgtatagtattcatattgttttcagcataattaggacagtcaagttgctttcaatgttattttaggacagcacctgcaagtattgagcctgaatgctactaatgcaagcttgcaggcaaaattagtttgtttctatatgaatattaagagccttgtcctaccacttgatgcaatggcacaagataaggaggccaaaaagatggagaagaaaaatgctaaaaagaataccatagaaaaaaactatatgaatgtgttaaattaaaaatataaggataagaagac

SEQ ID NO: 458406 - DNA, 408 bp, Sorghum bicolor
atcccggtcgaccacgcgtccgctgtggcggccatcgctgtcgtcgccgctgtagcctcccatgtcgtcgtcgtggtccacccgaggcggcgagccccctggcggcggcggtggtggcagccatgcccatggcccgcgccccgtccatgagccggagcggagccacctcgacgctcgccagacggaggaatcgccgactcggagcggacgcgctcactaccacgaccagctccgcttacacgagcagcatactctgccgacgtacaacttcaggaggaggcaccggtcggacgcgctgcaatgggcgacggcggtgctgtgcactgtgctggcggtggtggtgctggaggtcgccgtgtcaatcctgagtggggagctactgctgcaaccactggcgccgtactgtgg

SEQ ID NO: 458407 - DNA, 485 bp, Sorghum bicolor
cgtccggtggtaggcaacaggcaggttcgagttcgatccaatcgaccgcagccctccgtctcctctcgtcgcttcctccatctctcggcgtcgaatctcctcgggccaccgagcacactctactagccgctcggaaggagttcttccgggattggagccgttgctgccctcacctctgctggggcggcgtcgagcggagacccaatcggaaatcgagctgacttcgtcttttgttgcttccccatctggagaagcaatgtcaggagtgatcacaaagtttgcggttacatccatggtgatgtggatggccccggttgcgatcatgtatgggttctactaccaggtgtttccaggttcggcttctgttcctgttttcattgctgcatggtgtactccatctatttggtaatggtagttttttttcccttaattttaggtgtgagtcagatgtcatcctctgggcagacactcgccagcgggttcct

SEQ ID NO: 458408 - DNA, 538 bp, Sorghum bicolor
cgtccgcggacgcgtggggagcgtatcaagatgggcatttgagcaagggcttgtatgcagcccaaacaactggaactgcatggagaaattgttggaggtgcttatagcaataagtgatgaagtcgcatgcctttctgtagcaaatttaatacttaagagttggccatcacatcatcgtgctttacatgtgaagaagaccattgaatgtgctgaaccggtaccttttgcacctcggggtattgacatacttgaacccaagcatgcaaaactcatcttttccaataaaagaaaatctgtagatgatgaaatctgtcaagaaatagggacaaagaagagtaaacagagtgctacattgcaattgaatgaagcaaaatggttggcccttttagatggtatcctaagcttcataagtgcaaacaacgagaaggctggtgaatataattgcacaaatactgttgataggtgtcagtcagcgagagtagtgacaaggggcttgcttataacatgattgatgtgtcatatctacagatacaataaa

SEQ ID NO: 458409 - DNA, 424 bp, Sorghum bicolor
acgcgaatccgtcgccacgtcgctacttggcaaggctattttggccgtctgtcttgcgacctgagctggaactggagggagtggagaacactgatgctgtgagagaaagaactgcaattgcggaatgtgggatcttctacattaactgagaaagataaaagacattggctggggttcaaatgatattgacatgatgtctatcttgtcgaaaggacagattgggactgcaacagtttggcagatgcaagccataagtgatgtaaaggtgaaaccaagagggtgaacttgaggactgaggaacgtctttatgtgtagagggatctgaagggattcgtggaaatttctgacaaaagatattacaggacatgtgcaacctgtgtactgtaccaactgataagacaattctagcacactgctgagcact

SEQ ID NO: 458410 - DNA, 473 bp, Sorghum bicolor
cgtccgcccacgcgtccgaccgagtcaagaaatcatgacagtgagcacagacatttgagtaatcttcctgtatcaggaattcctgaatattctatgactgcatttggtataggagtaccaagatatgacagtggcagtcaacagagattgagatcatatgcacatcatcaccccctaatccataggccaacacctcgcagtggaagcaacttggtggcaccattagggtcagttccagctgtagtggcagagactagaggccatggtcatggtgcaagaggccatatgtaccaacagtcaatgcactcatctgtgcagggcagcccgttccctcctaccactagaagggttaggccgagagctttgacaattacatctttcattgcggcgacttcctcaggtgagattggagggcctcatgcccatggattttccgctcctggagctgtgaacaggagcgtttctgatgctga

SEQ ID NO: 458411 - DNA, 443 bp, Sorghum bicolor
cgtccgggcaggaggatgaggaggaacttcgcttgattgaggaagaagagagacgcgagcaggagaggaagaggcgaaagatggcacgaggccgatagtccaatactcaacatatttggatgttacaacttcacaggcctgattgcccgaggacaaggccatggtcgatcagacagctcttctcttgcattcctggttacccttgagcgttgcagacaacatcaaaccttagcacgttgattatctggaggcaaatcaaggaaaacagcatgtgagcaacgctgggcacacaacagaagcagaatgttagtcgtagtggtttagttctcgaagctgacatggaccgtatttaaactctcgtcagatttgttggataacacaaggctcccaacgttgcaacgcctcgtcggattgtttcttctaaattctaaatattggactga

SEQ ID NO: 458412 - DNA, 164 bp, Sorghum bicolor
cgtccggatgtgccgaacgtgcgtctcgaccattctaaacggccactgctccagatgacgatctgattttgattgtgaatcagcactatgtaacgtttgtgacggataatacacctcatggatttcaagttactgcacaccttatggggaatgagttctttgta

SEQ ID NO: 458413 - DNA, 51 bp, Sorghum bicolor
aaaaaacacgtaacggattgagcacatatgatatatgatccctaattaggg

SEQ ID NO: 458414 - DNA, 528 bp, Sorghum bicolor
cgtccggcgcctcaaagagctggttgatttcaagatggatggcaaagggaagaaggctgcagtgatgattcagaatcttgaagcagagaactctgcattaaagctcgagcttgagaaagcaaaggctgctgaagagaaggcagttcaattggagcgcttggttaatgaacttaagagtgatgctgatgatgctaggaagtctggttccgagtcggagctgttagctgatgaatggcagaagaaggcagagctgcttgaggtcagattggaagaggctgatcagtctaatattttgaagggtgagtctttgaattcagcaatggaagaattggattcaacaagtagtttgcttcgtgatagagaatctgaagttgctgctcttcgggacaaagtcacgttcttggaggatgagctggcaaagctcaagggtgatattgatgtgtcgggcaaacgggccaatgctgcagagaaagaggcggcagatctatggacagaggttgaagggcttaggttgaagctccgtacagc

SEQ ID NO: 458415 - DNA, 338 bp, Sorghum bicolor
  unsure (1)..(338): unsure at all n locations
ggtcgacccacgcgtccgctagttctagagagaacaggaagagcggcaccagaagcggcttaaagagctcttggaacgagtgacacctgtcattctgaggaaaagaaccatgacgagatcttagaagaacgaactcaatgcatngtgtagattgagccaagctcagtcgccgtctccttacagttataacatagaatttgcccttgtatgtcatttttctatttatatgcgccaacttagttgtagtaccttagctgatatagcatgggctattagctctcacatagcttaaatgtaatcatattttgtaggattgctcatgagtcatgacctaattt

SEQ ID NO: 458416 - DNA, 504 bp, Sorghum bicolor
cgtccgatcgagatcaaaatgataatgatccagccatccagggaagggagggacagcgagcgacccagcacttcacttccgatccattagccgttagtctcagcagcagagcgggaggagatcgagcgcgcgcgcgcaccggcaccgtcgcgccggggcagctagcaaacggatggcgcacgtcgaccggccaccgagccgcgccgtgctcgccgtcgccgtcgctgccgcggcgctcctccttgtcgtcgccgcgggcgccccgcgggcagccggccagacgacgacgacgacgacggtggtggatccggacagctgggccgatcgcggcgcggcgtgcacggtggaggagtgcggcatggccaggagggagctgggttacggcgggtacatcagctacgacgccatgagccgggggcgcgtgccgtgctcgtactcgggggcgttctactacaacttgtcggccgggtgcgccggccaacccttacttccgcggctgttccg

SEQ ID NO: 458417 - DNA, 479 bp, Sorghum bicolor
aaaaacaaattgtacatttttcattcataaaatataatcacgtgtaacattggagcttgtttggtaactcttcatttcatgattctcgaccggagcgagcattcgggtgaggagctgaaaatatcaagcacacacaacacacattctctcaattttcgctcatcacccgcagctctctccacggccatcccttctcaacagcatggctgcccttctcaatagccaacatcaccacaacatgttcacctgatgcaatactggtgccgacgtgcttgcctgaaccgaggtcctgactcagctctctcttgctttgatattcacctgaaaaaagaaattggtcgctctttcttcacagaacatcaacgatcaaaacacagtgaccaggggctttcttctttagtctctatggaataggaaaatcaggtttaaccatgttaaccacaagaatgcaaaatgagcagagtcagccaggagagaga

SEQ ID NO: 458418 - DNA, 444 bp, Sorghum bicolor
gtcgaccacgcgtccgagggatttgagcttcactgcaacaagtctcaggatggccaaaggaacactacgtacctctttaacatgccggtggccaacatattgctgctccaaggtcaggttcgggtgatgagttacattgcttccatgtgccacaaccgctcaaccacgaccttcttggaccttgctggcacgccattcacggtctcagagaaggagaacgtgttcacagtcgtaggagtcgacacgcttggcttaatggccggcacaaggcaatctgccatctatgtgattgggtgccaaacggaggagagctctcctaaaaacctggcagcagtagaggggtgcaccggtgtgggctgttgccaagttgcgctcagtagcaacgtatcctaccaacaattttccttcggtaatagtacatccgacaggaacataagtgccatt

SEQ ID NO: 458419 - DNA, 452 bp, Sorghum bicolor
cgtgcgattatctacatccaatttccactgcctactctttagttcagtaattcttcttctctaaaaaggtggtttagcttagtaattcagcaaccacaaattttgtttcctcactgacacatgacaaagtattactcaatggaaacctctagtccatatggacaaacaaggccatcttgaggatcacttaagctgcaagcaatttcagccaaaataatcatatgagacagcattctttttatccacaggctgtctgactagacacgcccatcttcaaaataatcagttgtcattggtttatctgaagctagtcataaactgatgatcaccaatctacacactagtaggcaaaccaatgagtgcaactgcgactgagaccactgggattctcattctccccaggttttgtgcatgaacacatttcaataagtattaaagtgctttctctaccc

SEQ ID NO: 458420 - DNA, 448 bp, Sorghum bicolor
cgtccgcgccgcgcggaggaaaaaaaaaagattcccctttgctcaccgggaagcgccgacgccgttgatggatttcggaaggaccaaagctggcgtcgtagccctgacgtccgaatcgacctccgcctcgttccgtctgcttttctcggtccccgccacgccgtggttccgggagctgtgggtcaacgcctccaaataacggctcttcgagaggagaacactggtggatttctcagctggtggtgggaaataaagcgactggcccagcattcttgtgatagcgatcacagcatcgtcagcttcttcagtttcagctgaaactagactgatcaagaaggcggccagccgtcgaaatgcatagacagaagactgcaaactctgggtgggctgcgtttgatcgcaagtggcgcaactgcacaatggtattggggatgaaggtgatgcttgt

SEQ ID NO: 458421 - DNA, 215 bp, Sorghum bicolor
cgtccggctctccaatctgcttttcttccaaagccttttaatcttttgtcactctgttgctaacacggtgaattgatttttagatcaggagttggggattgtgctgctctgctaaaagtttgaagaacgtgatgttgaggtgtttttcttgttagagtttgcactttgagttttgagtttctgttcaactgctcctatgcggtagtagttttctt

SEQ ID NO: 458422 - DNA, 185 bp, Sorghum bicolor
  unsure (1)..(185): unsure at all n locations
cgtccgtttagctaaacactactaaagagacataatgacgctatgaactgtgtattcattgtcaaatgacagcaattgtcttttactcagcagacccccaaataatatattntactcagcacagattcatagctgggtagctgcaatgggctccactaattcgtttctacagatctatccttttg

SEQ ID NO: 458423 - DNA, 342 bp, Sorghum bicolor
cgtccgcttccttccacccttcccttgcttctccgggagggaaggcacccgggaggccgccccgccacccatcgcaaaagccacgcgccaccaaactcttttttcccccctcacggcctcaccccgtcgctttcgcgttcagcgcgagccgagacgagccgagccgacacggtgggtcggtcgctggaggcggagccataaagaaaggcgtcggcgatgatgagcggcagatcgggcgggagggacgccgagggcgagtgggaggtccggcccggcgggatgctggtgcagcgcagggacggcgaggcggccggccccgtcatcaggatcagggtcttccac

SEQ ID NO: 458424 - DNA, 428 bp, Sorghum bicolor
cgtccggagaaatcctaacgcggcggcgatctgacctggtacttgttctacgttgaattgaatttgatccgcttattgggatttgctcttgcaatagtgcgcactctggaatgggcgcgtgcgtactgttcgctataatgcttgatcgctgataattaagttgttgggtcgtttgtaaatagctgctggcctttgattctctgtttcagtggccaatcgaccttacatgtcaaactaaaatcctatagcttcatgacctgtcttaagcttgcctgaatgcctggttcaacatgtacatttgctcagttgagagtgaggctgaggatatgggctcacaggggctggaacaggtgtgtgtaatgctgttcgttgcaatgcctgatttgtggcaattagtttgatgcatcacttatgggcgtctgattgtc

SEQ ID NO: 458425 - DNA, 367 bp, Sorghum bicolor
cgtccggtccgcctcccgtttgccgcctccaccgcaacgcggcgcgcggggtggcggtgccctcgcgatcctcgtgtcgattccagcggcgggggtacctttccctttccctcccctggccgttgcccgcgcctcgcggtcgcgcaccggaaccggagccccgcggcgaatctaggtttgcctccgccccgccctctcctcccgacactcccggcggctggaattaggacgagggtaacaggggacggaggctgcgagggacgccccctcgtcgaatgcaccggcgaccgatctgttgaggagcagccggagcacgcaggaggttagtctagttgaggggaaagcattgaaaacgtcatctactgtg

SEQ ID NO: 458426 - DNA, 407 bp, Sorghum bicolor
  unsure (1)..(407): unsure at all n locations
cgtccggcgtcgtcctgattctccgcctattcgtcgccgaccagatccttctcctgtcaggcgtggggacacacctcctcgcaggagaccactgtctccagttagaaggcgttctccttctccaccacctaggaggcataggtcaccgatgcgtccttcacctaggaggggacgtggcagcccgtcaccacgcaggcgctcccctgggcctcttaggcggcggtcgccacctncaaggcgggtgaggagcccaccaagaaggccgccacctccacgtcgctatagtcgctctccttcttggcgaccccttcgttccggtccagatcaatttctccaagaaggggacgagggctctcgttgaggcgtggtaagtcagactcataatattctcgatcacctactccacc

SEQ ID NO: 458427 - DNA, 481 bp, Sorghum bicolor
cgtccggttaagcaagataacagaagagaattaagtgcaaaggttgagcaattggaacaagagttatccgagctaaggcaagctctatcagacaggcaggaacaggaacaagcaatgcttcaggttctgatgcgtgtagagcaagagcagaaagtcacagaggatgcccgtatctgtgcggagcaagatgctgctgctcaaaaatatgctgcacatatactccaggagaagtacgaggaagctatggcttcacttacgcaaatggagaacagagcagttatggcagaaactatgttagaggcaaccattcagtaccaatctattcagcagaaagcacagctgccatcaccctctccttctccaaggaccttaactcgagatgcatcaccaggccaagggaaccaagattcaatacaggagttccagcctagaatgataagtttgcttgccccatttttccttggatggcgagacaagaaca

SEQ ID NO: 458428 - DNA, 482 bp, Sorghum bicolor
cgtccgggatgggcttgtctacacttccaatatgaatacataaagttggaggaaactcgcaaagaactcatgattagggttaagaacaagaaaaaacttctccaggaaattgaacgacagtttgatgacctccagaatatcaagtttcgcaaccagttactacagaggccagctgagagtgcgaatggtatctgccttccattcttattggtcaaggcatccagaaaagcaagggtggaaattgagatttcagagaactcaaagtttgctggtttcgacttcaactgtacaccattcaccttgcatgacgatgtctcaatccttgaagcgatcaggtgtaataattattgcataaaaagagctagctagctagcttcggcactcatcattggatgatcgagaatgtgatttgatctgttactgggcaaaactgttataatcagctccttttgcacagacattattatgcttaggtaaatata

SEQ ID NO: 458429 - DNA, 378 bp, Sorghum bicolor
ccgaattcccggtcgaccacgcgtccggtacaaacctaaaggttttttaagtgactaaaccccaatttattatgctgtcttgctttttgtttcaggcaacaggaaaaccaggaaggcactagtgctgaacttgtagggttggccactggtgaaagcaagggtgaaaacacaagcattcggctgtgcttcctcaatgaactgaagactcctgtttaccatgacgatgagataaaatctgagagcaatacagccattaaggttggcatatttaatggggacaagatgatcgagtcgggcggtctttcaaacctgcaaatggagatcttccgccttgatggcgacttttcttatgctttccctaagagttggacctctaaa

SEQ ID NO: 458430 - DNA, 103 bp, Sorghum bicolor
agccggtcgacccacgcgtccggctacagccaaagagtcgcggcagctgctttgtctcagtacatgctgccttcaccttgttttattgctttccttcccttca

SEQ ID NO: 458431 - DNA, 437 bp, Sorghum bicolor
gacccacgcgtccgggcagttggcttaaaagtttctctgcccttctccgagccatgcctgatgttgtgaaatttatagatcctctaccaggtgatagaggtgcaggtgctgctgtggttggtgtcttcaagagatcaagggattctgctccaagtagcattccagaaaaatgcaacaaggaagttaaaagtgaggagccatcaccatgtacagaaaagagaacacttcaagcagaagtcccaccatacccatcagatcagtcatctagagacaacaggaaagctcctggatttactcaacgaccgaagccgcctttcaaacctgagggaactgatgttactcgcgctgaggacgttccagcaccaccatctgatgcaccatctatagaccaaaggattgatgtggctgtcgatcctgttatgcaaacagaacgaccc

SEQ ID NO: 458432 - DNA, 405 bp, Sorghum bicolor
cgtccgcataggcatatattcgtgttcttcctaaattacatcacttcctctaataattacatagaagaaatcatcgtcaatatagtaaggaggcggtgtaaatatagctataagacaatgtaagtgcatgggtaaaaatctagctgccgggaggggctaaaacaccatgtggaagattttcagcttgaagaggcggacgagcactggctcggatctgaagtttacttgcacgaatcggaacattcaacagagcattcaaaccatgttctagtgcccccaacaaatatgcatccaaggtgcatgggactgcacagacaagatatttcatgttcacaaaaccttcagaacaggcttcttctttgtttctgagacttgggagtgaatgtgggatgccctgagtggaat

SEQ ID NO: 458433 - DNA, 101 bp, Sorghum bicolor
acccacgcgtccgatccacaatcagtcatccgcagtctacagttcataggttaccctggcaaccggatgttttgtgatcaatttcagttacttttgaaaaa

SEQ ID NO: 458434 - DNA, 532 bp, Sorghum bicolor
cgtccgtgaaagttctcattgggcatcatcagctttccacataaatgatgccacccgctataaatctggttcaaagtccataggaaagcacaaagcagcatcggaatctggtagacctcccaaatccaaagtccagaagattactgaatctcatcaggaagggccaattgtcatgagtaattttctccgtatgcctgctcaaatattgccaagtacagctgacttccacattagtgactccctatctgaatttggtatcagcgattctgaattcaactactctgaggatctctttcaagaggttgacgattttgagttcttcccagatcagggtgactctggtctccttcctggtattgaagagttagaacctctttcggatttcacagatatcggatgaacatagatgagcaaattattcttgatgggatgccctcctacaccaagaggagacaagattgcctctggcaggagcccaaggatatagggtgagttgcccagccgtgctcaaatgtgttgcaagcctgatcat

SEQ ID NO: 458435 - DNA, 329 bp, Sorghum bicolor
cgtccgcactcgctggccggccctcttggcatcctgctcgatcgaatgctggatcaggcagcacggagggtgcagcaaagacggcggcgcggccgtctgctccgtggaggggccgggggacccccccacgagggctcagtccgggccggctcctgcgcggctggagcgccgctccgcccctccccccgccggaaggcgcgggcgcccgccgcgcggccgcccgccccccgccgcacccgcccccgccccggccgcgccccccgacggcgcccgcgccgcccccggccggcccgccccccgcccgccgggcgcggccccgccggcccccc

SEQ ID NO: 458436 - DNA, 390 bp, Sorghum bicolor
cgtccgtacaatgggctagactaattcatacgatgttcctagttcaggttgtgtagttaaagactacaaaattgttggcaaggatgccaaaaggagacaggtgagacatggatgaaagatctaagattgggcttagagctacttctctaggtatatatccaggaaacgatggggactcgccgactagctcttactatcagagtgaggaccagcaagattctgccaagagagttgaaagagtacaaatccataatgatgaaccacaaggaaatctgctaggcaagcaatgcactaacaagcgaactagaaagccaacaaagagatacatagaggagctatcagacattgagactcatgactccactgtaaaaatctcttcaccagcaaaaa

SEQ ID NO: 458437 - DNA, 440 bp, Sorghum bicolor
cgtccggaaggagcaagaacgagaccttgaagaattcttccaatcaacagcaggcaaatttcagacagacatgggaaaagcatgggcagcggagattgcatcgagaagaaaaactaagtgatcaaaatatcaaatgacactcattttggcacgttggtttgaagacaacttgctggcacagcatttctgttgaactttgcttttactagacgatacttcaaggtggcactgagacgtaggcttaccttgggaaaaatgaacttcaccacatttcttggttctgctctgatcctgaggcatattgggctagcgataccactgtaccagggctccagataagccacttgggtaaggagttatattggttgtagcctgtaggtgctcctgtcacgagcaattagctggatccaacgtgaatcagcaccattttgtggggatgt

SEQ ID NO: 458438 - DNA, 149 bp, Sorghum bicolor
cggccgatcccagttcctgatccctccatctacggaaggcgaaggttggcggacgcgcggtgtctctctcctcattccccgtcgtcaaccctacgggcactctgacacaccatattttaccgccacactggcatagccacactgctcac

SEQ ID NO: 458439 - DNA, 327 bp, Sorghum bicolor
cgtccgatcagggtcggaatcagatgaagatttgatctttggggattcttcagttgacaatgaggttgttgctgattacatggagggggtcggtgggagcgatgagctgttgagcagtaagtggatcactggtatgaatttgggtgatgcagatactgtagagcagatgtatacagatgacgatgatgataatgatcggtttgtgaagaaagggaaggaaaagcttgagggttatgcactaatgactgcatccgagcagtatggcatgaagaggcccagctcagttgagaaggggaaaggaaaaagaatggtttgtaagcgcgattt

SEQ ID NO: 458440 - DNA, 192 bp, Sorghum bicolor
  unsure (1)..(192): unsure at all n locations
gacccacgcgagcgacgacatgaccganccacaccnaaatgcactttctgatccttcggacgcggntgtcctattagtataggaagctcatgcacgggggggtgaagagtctcaccacttccatcatcctggatcctacctaattcgcaccttgcacaacaaccattttcctactggagaagcgtggggctt

SEQ ID NO: 458441 - DNA, 95 bp, Sorghum bicolor
gggggccccaagggtttcttccatatttttttttcctcgtcgacgaccccccaatttttttttcattggtgcctttttttttaatatttttttgt

SEQ ID NO: 458442 - DNA, 180 bp, Sorghum bicolor
cgtccggtttaaggagaccagcttctgctcctcctcctcctccgactcagccgccgactgcgacggcgacggcgacggcgacggcgacggcgaaggagacgaagagtacccctcgctcgcctccgagagtggttccggcaagctcgcctcccgccgtcaagtggatctgaaccccggtgc

SEQ ID NO: 458443 - DNA, 132 bp, Sorghum bicolor
tacatgcgtccgtgcccggcaccatagcacattgcaccttccagggaatatgccgaagcatccttaatgccctactcattatatcttgacaacgtggccaactattacgccagcgataacctgactgaatac

SEQ ID NO: 458444 - DNA, 95 bp, Sorghum bicolor
acccacgcgtccggctggacttctacgacgtcagcctcgtggacggctacaacctccccgtgctggtggtagaccttcggcggcggaggctccac

SEQ ID NO: 458445 - DNA, 412 bp, Sorghum bicolor
acgcgtccgtgccacccctgccatctgccgacaccaccctcgaccgcggctccccatccccaattcgcgacggcgcaccatcctcgggcacgatccgcggcggcgtggcacccttccccagagcggccccaccccgcgcgagcgcatggtttcgtcccgcaccggcggtgagcacggccgcgcctcccagctgcgatggtgcaggcccccatccacctgacggtggcctgcctagcgcgccatgacgtcaaggcagcgaccgagatcatggtggcacgacgcgacctacgctgaagatgcccctcggcggcggcgcgaccatggtactccgtggaggtgctggcgtgcggtgatccagatggagttttggcagggacaaccatgatgacccgcagcggtggcagcatctttt

SEQ ID NO: 458446 - DNA, 77 bp, Sorghum bicolor
cgtccgcttattcgatggaccacctattccaggactgttagagagcaagtgcatctctccagatgtcataacactat

SEQ ID NO: 458447 - DNA, 82 bp, Sorghum bicolor
cgtccggatctgcttctcatacccctgtaatgtgccattttgttcttgatgcctacaagcttctacgtgttccagctaaaaa

SEQ ID NO: 458448 - DNA, 337 bp, Sorghum bicolor
cgtccgagctgctgcggacatgatgatgctagtgtggtgctgttgaagaatgagtgccagtcttagatctctaccgatggataagcacaacacccccactgatggggaagtggcgaacaatgcgtttcgcaggatgattgttaatcagaccgtttgggacttaggcctagatgagtagaatgtgccttgctataccccgagaaactgtgatcactctacattccgaggcttatcatgaggcagggcatttgcttctactagttgatagcacaacactgattaatagatgccactccagtatgtggagatcctggatccctactgagtttacaaccgt

SEQ ID NO: 458449 - DNA, 463 bp, Sorghum bicolor
  unsure (1)..(463): unsure at all n locations
gacccacgcgtccgcccacgcgtccgttatattgtatggtttctgggcattatccatttcttggggatacattgcaggagacttatgataagattgccaatgatcctgtgcaaatacctggagacatgaacccccaacttgctgatttgctcctaaggcttctctgcaaagatccaggagatcgcatcacgctgcaggctgcggctgagcatccttgggttgctgggggtgaggggccagtccctgaattcatctgtagatgtgggtttggccgcaggaagaggaatgatgtccgggaagaagtaaataacanagcatnctcggatggtctgcangtctagtgtagataattgatgaagattggcaaagcgaagctctaacgatgagtttgtttgttgtttcgtgttcccaatttccaatatgagtgctgggtgctcgactgaaaatttttcttttttggaca

SEQ ID NO: 458450 - DNA, 428 bp, Sorghum bicolor
acgcgtccgtattgataaatggagaaatggaaggaaacatcttttttcaaaataaagaagtgtctttgaacgggaggtctgaaacctccgttcagagttcaacaggagataacaaggttgacaagaatgatgctaataatggaaggaacaataagtccaatgtggtcgtgcagaatggttgtctacctagaggggcaactgataaaacaaaccaaagagagtatcatggtgacatggtacgcaaaacagcaaggtcattcctttatgaactatgtgctgcaaactattggaaacctcctgaatttgagttatgcaaagatgaaggaccaagccaccttcgaaagttcacttgtaaggtccttattcagatcacgggaacttcagcgacccttttggagtgctataacgatcctaagcttccaaagaaa

SEQ ID NO: 458451 - DNA, 366 bp, Sorghum bicolor
cgtccggaaagtgatgacttatctacttattactcaaagaaacaccacagtttcaccttcatctgtggtgattgctgcaagcagaagaatgtttttgttgaatgaagcatattaatgtggatagtggtgctgcaaatcaggtggtttctctgtaggatacatatgacaaatcaccatgaagcaaattaatgttgacagtggtgctgcaattcaagtggttcctctgtaggatacatatgaaaaatcaccatgtgtggacttggccacccaggttctagtctcaacttgcacataagggggctcttgcgagttgtgacacaatcttctgacatcaaagcatgaacactagccctgctaaatcccttc

SEQ ID NO: 458452 - DNA, 435 bp, Sorghum bicolor
cgtccggaagccaatcacagctgttctcttccaggagtctcctactccttttccttcaaagcgtctccgacgctcagtgccaccagggctgccaagacctgtgtgtaaagctgcaccctcacccagagttttactatacgaggaggagctttgcgaagcggtggcacagaataagcttctctgaagatccaaaaagtgcattgctttcatctatagtgtacagtttatctatgtcaagcccctagtatgagttttgtctgccagctcttaagctggcatattagattattgtgttcaggttaggttttagactagtgttagactgtgctatacctttaataagtatggagtttggtttatttcatgagtttgtatatagcacataataaaatggacttttttgtgcatttatttatacctatatcccttttcatg

SEQ ID NO: 458453 - DNA, 337 bp, Sorghum bicolor
  unsure (1)..(337): unsure at all n locations
gaccacgcgtccgggtggctccacagccgcggcagcgtcgtcgtctgtgacggggacgccgggttcacccgctgctgctggtaccgccagtggtgccactgagcangtgatcggctttcagtgaagaaatcaaagtggagttgatatgttgaaaagtcgtagtggttgttcttcgttgggttgtgattgggaatgtttacgagtgtgtcatgctacgcacttttatacagttgaataaaggttacttctttacgtgagcttgatgacgctatctggtactagattgatcaaggattattataaaattctggctcggatgaggtgtttaaaataaaat

SEQ ID NO: 458454 - DNA, 216 bp, Sorghum bicolor
  unsure (1)..(216): unsure at all n locations
gggcgcgagggcggaagcttgaacattgtttccacctgnatcgcaatccttaatgccccttcacacgccaacgcagcactcctcgctgtggcctgtgtggccatcttttctggcctattcaccccccacgattatttttaatatctctagaaatgtcaatggttcaattctgagtgtatgatggtcgataacatagccgttttttggaaccacacc

SEQ ID NO: 458455 - DNA, 384 bp, Sorghum bicolor
cgtccgaactttttctagacgactcaaaggttcagagattgattacaagattaaccaactacagttctagtatgctccatttggttttagtttcagatagtgtgtgctgacattgggctgtcgaagtatctggtgtatcaactgctctactctatagcatctatttgacttgttcagccctatactgtggcaggacagaagtttctttggacaatttcaatagtgaggtgccttctggttattgcagccttgtattcggggatgcttatgtttgatttcttattcaggactcttacccatgtctcattgccatgcaaaatgcatctgattttggatcatttatggataatagtttgcttcgtcttagtttcctcaatggatttt

SEQ ID NO: 458456 - DNA, 370 bp, Sorghum bicolor
  unsure (1)..(370): unsure at all n locations
cgtccgatcaacctcaggaaagaccaggccagcaagtccaaggggcaattggctgtacaaggaggatgacctgaggagcatcacaagcatccgctctgagcgcccaaggaggcagagcacaggtggaggaggctcagtccgggatgatgcaagcctgacgagcacaccacctctccccagttacatgcaatcgacagagtctgcaagggcgaagtctcgataccgcagtctactgactgagaagctngaggttcctgagagagcacctttggtccactctgttgttaagaagcgcctgtcgttccctgtcgtcgataagccaagtgttgtgccgacagataagccaaaggaaagagtgagacgccattca

SEQ ID NO: 458457 - DNA, 413 bp, Sorghum bicolor
aacccccggtcgacccacgcgtccgaaaaaaaaaaaaaaaaaaaaaaaaaaaaaaaaaaaaaaaaaaaaaaaaaataaaaaataaaaaaaaataaaaaaaaataaaaaaaaaaagaggaataaaggaaaaaaaataaaaaaaaaaaataaaaggggcggccgttttaaaggatccaagtttacttacccgtccatgcaacgtaatagtttttttatagggcaactaaaattaaatccatgggccgcgtttttaaaacgctgtaaactggaaaaaccttgggttaaccaaattaaatccctttgaaaaaaatccccttttccccaattggcttaataacaaaaaggcccaaaccaatcccctttcaaaaaatttgccaaacctaaatgccaaatggaccccccctttaagcggc

SEQ ID NO: 458458 - DNA, 469 bp, Sorghum bicolor
cgtccgagattattacaacagagggcgtgggagaggaaggtcacgtggacgaggagggagaggccgtggtggctactatggaggtgggaggcgtggtggctacggttatgattatggctatggcgggagaggcgggtactatgaagagcaagatgaatactacgatgagcccgaagaatatgcccctccccctggccgtggtaagccccagactgatgacgttacatgctgatgtggattttgctctgcattcctaaattctcatggtttgcggtctgctgtttcgcatggcgtggcagaggaagaaaggggatgccttggcgcgggcgtggtgggcgtgggccgccgcgcggcggccgaggaggctactactagacaagagatgcgacgtgccaaatgggtgtgctgaagctagcaatggcgtgcctagttatctgttagcgtttgctctgtgctcttctatggagct

SEQ ID NO: 458459 - DNA, 441 bp, Sorghum bicolor
cgtccgcccacgcgtccggaagaatgtcaacactactgctgcaactgcaagcggggcgactctcccaagcaaaccaaagccagcagcaaacactgacaaaagcaaagctccaagcaaagcagcagcaggcaacaagaaacctgcgaaggctggaaccaagcaagggagcattatgtcattcttcaagaaagtatgagccagcgcggtgtgcaccaaaatgagacaggaccttttgctcagcaaactgtctgctgccgcgcttagtgaacccaggtctccaaccaggggcagctctacgtgaatatcgtcaggccggcaagtaagaagggcttcgagcagggaggcgtccgttagctatatcattttgttgtagcaggcgtagtgacgctggagtgaagcagagaccacgtcttttaagtcagagattatcttgctgtagct

SEQ ID NO: 458460 - DNA, 391 bp, Sorghum bicolor
cgtccgcccccatggaccttccggtggtggatctcgcgccgtatcttcgggccgccgccggcgacgcggccccggcgggtgaggaggagctgcgcacgctgtgcgccacggtgagcgctagcctgcgggatacaggggcgttgctggtgatggacccgcgctgctccgcggcggacaacgaccgcttcctcgacgtcgtcgagcgctacttcggcccgatccggcgacgcaaagcgcctccaggaacggccccacctccactaccaggttggtgtcacacccgaaggggtcgaggttcctcgcagtttggtcgacaagaacatgcaggagaagatcaggagcatgccagaggagtttcagccagccacgcctaaagggccggacccgaaat

SEQ ID NO: 458461 - DNA, 447 bp, Sorghum bicolor
cgtccgctcattagcatttctgttagcttgtttggagctgagtaacagacacttatgaggattgacatttgagatttagggcctgtttggttctccttgctaaattttagccagctaaactttagtcactttagctaaacttccaaacacacgactaaaaaggagctaaaatagtttagtcccactaatcacccaagagtaactaaaatagttttagctacctaaaaaattagcaaggggaaccaaacaggctcttagaaattaacgacggaaatgtggcacaactcattcagatttgtaggattctgataaagagtggcgtctaggaattatgaaaacgtttcttttctggttagttattctcgtgactgttaaaatcatgtggttctgtttagtgccagtatagggcatcaaatgaaggcaagtttcccactgtaacaaataccc

SEQ ID NO: 458462 - DNA, 438 bp, Sorghum bicolor
cgtccgcgatttctttcttgataaggttgcattgtatcagttaccttgcgcttggacaatcagtattgctgtagattgtatagtgacatcaactaatttgcgagatgacatgccaattcaataaactactgctaatctgctaatattagttgaattcctaaatcctcatgtattaggcattagctgctgaactatatagtcccccctggaattagcggcattattgtgagttctgcctcttaatgctattttgttctagatcagatcattttaggtaaacaacaattgtgaagctagtaaacaattttctgcagccatctttttgtttcacttgatgtagttgtcattgctatgtgtcgtgtctccatgtttcatttcttactgtaaccgtgcttattggttggttccatttatcttgttttaattgtagagagggac

SEQ ID NO: 458463 - DNA, 469 bp, Sorghum bicolor
  unsure (1)..(469): unsure at all n locations
cgtccgggaagacactaacaagggcaagaaagagtgagtagcatgacctgaaatcttgtggtatttcctttctttttcaacttgtggatagatgtttccactaatcatcaatttacttatggcaaacatggcaatattgcgatagcatttaccatttgaagaatgccttttatttttcttctttgaaaaaatgaaattagtggatagtagtcactaatgctttgctgtaaataagcttccagttatgatctgccatgccttttcttttaaaacgttgatactaatatgtggaaaagtacgagtttcttttgaatacaaggtgcatatgatgttgttgattggatccctcaaccatcatcgacatagcagatcattctcctactgcatataaagtgctcgaggaactagcgtcacctttgacaaatttgcctttgtcaagcataaaactatggncagtgcattatcattg

SEQ ID NO: 458464 - DNA, 360 bp, Sorghum bicolor
cggtcgaccacgcgtccgtcaatgtgcctcagacatatgacaccaatggaaagaaatccttccaaccatgctacatcacaacaaagccaccattgacctcccacgaaatagaggaatctattttaaccatcctgtggaagacatccttgaccgagtcacgccattgctgttgtccacaccaccatccaccaccacccattcgcaccacactcatacatgcagtttcacaaataacgggtaattcgtttagacagcaagacaggcataggaacatgttttagcaggagaaggcatatgaacttgagcaagatttatacgtggacgttattgagttggcacgcatatcctagatatatgact

SEQ ID NO: 458465 - DNA, 377 bp, Sorghum bicolor
cgtccggcccaacctctcgcagccgccgaccgaggagcggcggccgaagaagaagaacatcctccggcgccgtcgccggcgctggcgccggaggaggcgagaccgtgactcggaggtgtttctgggcggtggagaggttcctggctcacggcggcgagcggtgcgtgagggaggtcaccagcgaccgggcgctgccgagcctgctggtgagcgcgttccacacgggcgacgccgccaccaagcaggtggccgagagcgtgctccggtgcctgcaccgcatgccggactactccgcgacctacgaatccgtcgaactgtaaccaacaacacatgatgcacacacctgtgcatgtcttcgactctttttttccatgttt

SEQ ID NO: 458466 - DNA, 429 bp, Sorghum bicolor
cgtccgcccacgcgtccgctccctcgcagcgccgcttccctcactcgcgctcaggctcggtcccaaggatcggatcttccgcgcgtcggcggctccccctcggcggcgtccaacgacggaggggcagtcccaggctccgcggcggcgtcggcggctccccccaccttctgtcgccagtcgcctcgcgccctcgcctgcgtcctccgcgcaccggctgacgaccctgctttagatgattccactggtacagcgggtgtgaagttctcaagggcacagggttttcaattgtagccaatggagtgttccaattcaactagttcccaagggcatcatgtaaatggaaagcggaatcaagtgcaaaccattgatcctcctggtcctactcctaccattgttgaaatgggaccaaggcactgcccattgactttc

SEQ ID NO: 458467 - DNA, 326 bp, Sorghum bicolor
gacccacgcgtccgctcagctttgactgctcttgcattgcttgctgctcagttctcttcccccctgttcctcctcctcttcttctcccacctcggcgcctgcttcggcaactgcgagcgagatggaggcgcaagacgactgcaagtggcgccagatcccggcgttcggcgactggaacctgtgggacgacatgcccgtcacccagtacttccaggcagggaccttcttcttcgccgcgccggccgagaaggacgacgaggatctcttcaaggtgccccagttccctgccaagccctacagctacaagaagtgcgttgttcgagtga

SEQ ID NO: 458468 - DNA, 385 bp, Sorghum bicolor
ggtcgacccacgcgtccgcccccgacaccagaaaaaaaaattccccattgtttgtctctgtcagtgaagagtcgcggcggcggcggcgatgtcgggcgcggcaagggccgcaggggctgggcagggcggcgcgaaccgccccgaggtgctccggacacatccaggcatcccaaaccggcatccgagctggccggagggcgggtgagcgctctcgggctcattacaggagaccgcgcgtgctaagatcttctggagaacgtaccgcgacccgtacctacccgagcacgcccccgaagacgcaccgcatgacgtgtctcgcgctaagcgcaggccgacccttacgcttcgggctagatggcggcgcccttctcttgagctgttaccg

SEQ ID NO: 458469 - DNA, 465 bp, Sorghum bicolor
  unsure (1)..(465): unsure at all n locations
cgtccggagccagccatcgcctcgcggaggctcacgccaagttcgcttgccgcttccctcctccccggaatcctcctcgatccccagagcccaggcgcctagcacgggggagctgcgtcgggcgaatggagcancaggtcttctacagggcgctcgggctctcgctcgtcggcggcctcagcaccgccctcggtgcgctgtgtgtggttatgaatcctgcccctaaaccttaaagtgctcgggcttctacagggttttgctgctggacttatgctcagcatttcctttctagacttggcacacaatgccctgaattctattggcttctagaaggggagcctctggttttttgcaggggttcttttttttgggtttcattatctaagtttattccagagccaaatttttcggcaccagctgatccaagcgagaaaaaggctgatgatgctggaaccgtgtaagata

SEQ ID NO: 458470 - DNA, 455 bp, Sorghum bicolor
  unsure (1)..(455): unsure at all n locations
cgtccgcggacgcgtgggctcggctcgctcaccaaccagtccccagttgccttcgctgatggccaccgagaccatccaggttccggcgccggccatgccggcagtggctgggcgcgccgccaccactggcggtgccagcagggcgggcctgccgccgccgccgcggaggggccagatcaaggggaagatcatcaaggacgtcgtcgctgctgtctccgccatggccgcgggcctcgtcaagaacaaccgcgccgacgacgaccgcgaggagggtctcccggcctctgacgacgccggcgacaagtgaaacaaccgatgacgacgccggccgccatggatggctctccgcgttctcccttcccgtccgctcgatgctgtcgctcctctgctgctatcatgtgctcatnttagtgcacgcagcagagggaccaaggatggagagggcaaaaatacta

SEQ ID NO: 458471 - DNA, 211 bp, Sorghum bicolor
  unsure (1)..(211): unsure at all n locations
cgtccganatttttcttttttcttttatcctctttctttgcttatttttatttttgacttttattttttcttttcttcattctatcatttccattcttattttcattttatatttatatatttctttttatcattattttctatgcacatgtttcttattgttgttatatattatgttatttcttgtttgtgcttcttttttagtctatat

SEQ ID NO: 458472 - DNA, 144 bp, Sorghum bicolor
cgtccggagttgttcaaggtccattgaggggcacacaggctgtatttaagacataagatttgaaacaaaggtataccctggaaaccgtgctggtgcttctgaaactgatttgatggcacttaatgagttaaaggctcatgcttt

SEQ ID NO: 458473 - DNA, 205 bp, Sorghum bicolor
cgcgcgcggagggcaataagtgagaataagacgcgcgtgtgttcgctggcgagcctgtagaacaacgcccacacaccggaggggctccgcttgcacccgcacaaggaacaaccgatgacacccgcgcatggtggttcggctcctccgcgtgagtgcgtcttgtgttatgtctattaggcccacaaggccggtgaatggcaatctc

SEQ ID NO: 458474 - DNA, 175 bp, Sorghum bicolor
cgtccgctctccggctgcctgccccacgaactcggcatgctcaccaaggcggccgtgattgacgccgggatgaaccagctcactggcccaatcctgtcgtccttctcctgcctcagcagcgtcgagcagctcaacctggccgggaaccgcctctacggtcaggtacccgacgcac

SEQ ID NO: 458475 - DNA, 159 bp, Sorghum bicolor
  unsure (1)..(159): unsure at all n locations
cgtccggngtatcccgcggcgcaccacgaactcttctttcttcgccgtcgccccaccgctcccgctcggactaccaccaccgctccacacctnccgtcgcgccgncgagcgacggcggcatccgccttctncggtccgtcctcgcacccgcgccgtctc

SEQ ID NO: 458476 - DNA, 412 bp, Sorghum bicolor
cgtccggcaggagtggtaattctgttgatgttgttggtgaatctggagctccttttttcggtgaagttaactcggagaataaaggtacaacttgatagatccagacttctgagtgttcgagatcatgtcaggttcttcttttgtccatccctcatcttcaccggtaattgtgtagctaacggagtttctttggatgttggtttagtagcttgggagatcgggttggttgttagatcccacctactccggtggtttgcatcttcttctgggtgtcctctacactggcgtgctgtggctgatactgttcatagtgtcaggccttttctacaccggcgaagagatggtcgttgaccatcttgctcggcctattcgttcaacgactacacggcaatgtggttttcccgatgtgcta

SEQ ID NO: 458477 - DNA, 215 bp, Sorghum bicolor
ggggggagggtcaacaatatattccattcatggccaaatcaataggttcacaagtcattcatcaacatatttattacattcatcacggacacaaaactatagttcaacaagggactttagtcacaaagatatctcagataaaggaaacaaatgaaatctcacatccctatctaacaagggtccttagtcaccaaactaatagttcaataggggct

SEQ ID NO: 458478 - DNA, 194 bp, Sorghum bicolor
gcgtccgaaatctgccattttgaaagcaacacaatccctaaggaaagcaaaagggagtccaatggcaacgatgagaaaacagatgcctcagcagctgataagtatccgcttgtatctgtccctgatgagacccttaccccagagcagtttaagggaaaaaagaaacagattttcttaaaccacaacaaggcaat

SEQ ID NO: 458479 - DNA, 354 bp, Sorghum bicolor
cgtccggaatgactaactgattctagaataaaatcctataaagcgccttattttgctgttactaatagctgcaccacactacttgcatcacgcgtaggcatctatataaatcagcgaaaatgcatttgcagagtaataagcaatatatcattacacaatttgaacaacaatatagaaatgaagtcgctctacacaagatactaaataatttgtaatcatatgacttgatcatcatgattaaacactcccatgataaccctaacgtgctctatatgcagtcttacataactaaaatccactatgcacacgccgaccacacatctgtccacctcatctcataaccacagaactatc

SEQ ID NO: 458480 - DNA, 421 bp, Sorghum bicolor
cgtccgggatgacttcctaattgtagaataaaatgttataatgagccttcttttgctgttactgatggctgtaccacactgcttgcagtacgggggggcatcgtatcttagatagaaattgaagtttcaaagtcacaagcaatggatcatgtgacaatttgagcaacaatatagaaattcagtcgctctacaaaagatacgatatttactctgtgcatatccctagctcattgaggtataaacacacctaagatgaccctagtgggctatcgatgcagctctgcataacttgaatccacttcggacagactgacctctcatctgttcaccttagcacagaaccagcgaactatttgagtgcttatgtggatgttccatgacctatttagagacgcatgcttcaaaagctaccgatctatgg

SEQ ID NO: 458481 - DNA, 54 bp, Sorghum bicolor
tttttgtgtctgaggtgaccacactgttgagacgcatggctcgtttttatataa

SEQ ID NO: 458482 - DNA, 364 bp, Sorghum bicolor
cgtccgcactcacactacactggcagcagctgagatgggcgtggaggagaacggcagcagccccagccccgccgacgcggcggcggtgaccgtgaccggagcgcgcaccgtggcgccggccaagaaccggtgcacgctggccaccttcgacctcccctacatcaccttctactacaaccagaagctgctcctgtaccgcaccaccgccgccgcgccggacttcctcccgttcccggacgccgtggcgcgcatgacggccgcgctcgccgacgcgctccgcgtcttctacccgctcgccggccgcatcgtcgtccagcgggaggaggacgacgacagcggcggcggcgcgggcccgggcgcgctc

SEQ ID NO: 458483 - DNA, 338 bp, Sorghum bicolor
cgtccggtcgatcgagtgagactactgcagccgccgccgccgccacctcctctccgatccgtttcctcctcctccctcgaaatcgattcgatcgatcaatcaatcaatcattgtcgtctgcaccatctccaatcccctaccttgctagatagtctagtcaggccgcctgctgcctgcctcaaacggatcgacgggactggagggaggaagaagacgacgatcggagtcttggagatggagggcggcaacgggcagatcgaccgcagcgaccagcgggaggagatgaagctcatcatcgacacagatcccggcatcgatgacagcgtggcgatcatgat

SEQ ID NO: 458484 - DNA, 185 bp, Sorghum bicolor
cgtccggttgcccggacttctcgtctctactgcacccgactcgttacacgctgggcgcgcgtgcttcaccctcgcggtggattcgtggtgcccggctcagcaatgggggcagccttataccaccacacacaccacgagtcctttctgtagggggggacccgaagagcgtggggggatgactgata

SEQ ID NO: 458485 - DNA, 134 bp, Sorghum bicolor
gcgtccgcactttgctacacaggggtcattgccccaaccgaatcagtctgcttcattcatggaccaattagcaccatagcctcagtagttctaacttcaatgctgcattacattgcatattcaacaactatcct

SEQ ID NO: 458486 - DNA, 399 bp, Sorghum bicolor
  unsure (1)..(399): unsure at all n locations
cgtccggngacgagacgacgaggcaggcagagcgggcggcgactacagcggcggcagcagcagatctcgcgggatggcggcgaaggcgatctcgagccccgtgccggtggagtggtacccgacgctggccgtcctcatggtgtccgtaggcctcatgttcaccgcctccttcttcatttatgaagcaacttcatccaggcggagccgtagcctggcaaaggagatcgcaacagcagcagttgcttctgtttttctgggctttgggtctctgttcgtgctccttgcaagtggtggttatgtctgacgactggctatggatcatgtgcttgtgttctgcagctctaggtgtagtcttgtaggattgcaagatccttaaaggttgtgtgtcctaaaaaatat

SEQ ID NO: 458487 - DNA, 176 bp, Sorghum bicolor
  unsure (1)..(176): unsure at all n locations
cgtccgcccacccctctcctccctccgcccgcctnctccgcgcccccgaaggcagaaccctcgctccctatcccggtcccctcctcgcggcgtcggtcaaaccctagccacggacgcgcagacccgncgccgctccattcccatcccaccatgggggcttcggcctacccggcggc

SEQ ID NO: 458488 - DNA, 128 bp, Sorghum bicolor
cgtggcggggggcgtacggttacatgtggcttctggttctgctgcactgttaaaggtgacatctctctccgccgccgccgttgacatctggggggattctcccctgcgcggggaagggatcacactgt

SEQ ID NO: 458489 - DNA, 124 bp, Sorghum bicolor
cgtccgaaagactccaagctcctgtgtggcttctgtttctgctgccgcctcctggtccacatctctctccgccgccgccgctgcgtcgtcgtgcgccacaccgtagcgctgggaagggatcaca

SEQ ID NO: 458490 - DNA, 449 bp, Sorghum bicolor
  unsure (1)..(449): unsure at all n locations
cgtccgcggacgcgtgggtgaatccaaggacctccgattcttcgggaccggaagctacctggaaggaagcaagggtcaaagggagtgtaatgctttccgaatctgctaggggtgccaaaatactagctttggactactttagcatagttttgctgggggtggagcgagctgaatctcgtgaatctgttgcccgggatgtggatgcagagggatagcgcatgctatgttcccaagttacctgctctgcgctgagatagctaaatcttgaagcgaaccgaattcttccgttacgttgggctgactgaatctaatctgttacatgatgacgtagagagagtgccctaggatatatntcttttttttttttttggccttttggctttcggtttcgggagaagcttgagttacccagctttcctgcatccatcagccgcagctgatttcattgc

SEQ ID NO: 458491 - DNA, 251 bp, Sorghum bicolor
cgtccggtctttgcagcatgcgaagaagatacgtaacgagagggaaccttggcaagttgtgtgaaggttgtgggagcactcttgatgttgaaagggttggtttggttgtagaagtaataaaaaagtagggtttggcttgaactcgtgaacccccggaaagagattagctttttgttctgaaagcgcaggttattatgtaaaaacggtttgcttgcatctagaggtgaatgtttgagacctctgtacaaaaa

SEQ ID NO: 458492 - DNA, 405 bp, Sorghum bicolor
cgtccgctcctcctcgcccgcgctccgcggcggcggcgggcaagactacgacacggcgtcggcgcgagggatcggaatcgggtggtggtggtgtatagcattggtgtatctacttccacatctggtatgagatccgggacgacttggtcagtccatctccattgccattcctcttgtgctcaatttttgccttttttctttttctttttgtttttgtttttgtttttctcttgtctttttttttcttttcttatttgggttttgctagaatgtgtacactgggagggagatgaagtgaggtgaggggagagaagattgagctgcgaaaacaaaagaaaaatgcagcaaagcaactctttttaaggtatagaagaaaacaagaattggttatttggccccttcatc

SEQ ID NO: 458493 - DNA, 167 bp, Sorghum bicolor
  unsure (1)..(167): unsure at all n locations
cgtccggcactggtgactcggctcgtcaaagaaggtataggacaaaccaccttatcaattggggaggtgtaccatcatcaaggaagttggtgatggaacatttgggagtgtttggcgncaaccaataggaaagtggtgaatggtggatcaaaaataaaaaaattatt

SEQ ID NO: 458494 - DNA, 378 bp, Sorghum bicolor
cgtccggcatccgaaccgtcccccaagcgcagcgcgtccatggcgtccaccgcgctggtggcagtggcagtggggggcggcctctgtcccggtctcgtcgcctcctgcagcgtcgcatcctgctccctgcgcgccggcggcggtgactccccacggcttggccgccgcctcgtcctcctgcagagaggaagaggcgccgagggagagaggaagaagatacggaattgcccaatatttcgttgtgccaatgaagtggatgtcgtgaccgaggatgacaatgtggatggtgatgctaccgacgatgaaaaagaccttgaggctgcagctgatgacgctattgatgctgacgttgatactgaagatgaactggattcttcg

SEQ ID NO: 458495 - DNA, 493 bp, Sorghum bicolor
cgtccgattggagtgagatcaagcgcccatctggactggtggcgaccatgaggtccggactcctctcactatgtttccacttagccctagccattacactggctacaagtgttcctggccttgttcatagtagggtgattgatctaaagctacaacccaaaccaataccgcaacctgaaccaaagcctgcaccacaaccagacccaaagccagaacccaagccaacaccgcagcctgacccaaaacccacaccacaaccagacccaaagccagaacccaagccggcaccacagcctgaaccaaagcccgcaccacaaccagatccaaagccagaacctaaaccgacaccgcaaccaaaaccaaaacctacaccacaaccagacccacaaccagaaccaaaacccacaccacaaccaaacccaaaaccggaacctaaacccacaccacaaccagattcaaagcccgagccaaaaccaacaccacaggcaccctt

SEQ ID NO: 458496 - DNA, 258 bp, Sorghum bicolor
cgtccggctacacttctgagttcacgtcctcaactgccacatggagcggcacaccgagccggtctgccacagggtgcgatggactgctctatggcactgtctcccttactggcaccttttttaacaccttgaggaaccttcggagagaggctccaaaagagggtacccgccaaggcacccgggaggttcgtagcgccttcctacgtccctgccaacctggagctgacacaggaacccaggatgaacgccaggcttata

SEQ ID NO: 458497 - DNA, 394 bp, Sorghum bicolor
cgtccggtcctcgagagcgtcgtcctcgatctccaaccgcgacagctccgtccttgagcgccctccgcggcagagtcgtcctcgttcgttaccgtccgcgcgagccccgtcctagagcgccgcccgtgactgctttgttcttggccgcaacaagcaccgtcgcgccggtcacgaccacctggaacctgaatatcaaggctaaggaactgccgaacgacctctccaagctgtacgcaacggcctctcgaactggtcaatgtcattcccttggtcccctctaatttcctgtgtctctgcatatttgttcagcaaatctctgctttattattgcttcatcttgttcctatgccttatttggaatagccactagcaatcttgctctgacaactggaca

SEQ ID NO: 458498 - DNA, 349 bp, Sorghum bicolor
cgtccgggtcgcatgactgtcacgcagctcgccgccgccggctcggcaggcgggccgtctggtggggccgctggtagtggcggtgctcctgtggctgatgtggcgctccggaagatcttcgttgggaacgtcccggcagacatgccgtccgagcgtctccttgcgcactttgcctcctatgtatcccaacgtaccgccttatttctaaggtgtgtgacaactgttgggagcatatcctttgaaatggttgtgctgaattcagaagtgttgtctgcttacatggatgcttgcatattctggctacttctgatgtggaatgtggaatgagtttgcactctcaattttcgat

SEQ ID NO: 458499 - DNA, 254 bp, Sorghum bicolor
  unsure (1)..(254): unsure at all n locations
cgtccgcccacgcgtccggtaaaaatggcctgnggtcaaggtgctaagaggtccatactagggcttctctttcgtgctcagcagcaaactgctcggccatactcttcttcagcattccagactcatcaattgagcactcatgttccccaagatggcgtgtttcttaggagattcagctctgaggtgtcttcttcagagcaaatgaaccttataaagcaactcagacaaaggacgagtgctccaatcaaagatgt

SEQ ID NO: 458500 - DNA, 253 bp, Sorghum bicolor
aagcaaagaagtgaaatattgaaacaaagctgtagctttctagtccagtacttcataagcactagccaaattttggagcgcctgaactattttgctgttatataactttttgtcttgatattcgaatatcatatctggatttttatgttggataatgtagtagagatgtctatgcagagttttgttgggacaggaatccccaaaaatgtttatttggatcagattatctcgggaaatgggggtatgttttatg

SEQ ID NO: 458501 - DNA, 62 bp, Sorghum bicolor
cgtccgtcagctctgaccgcctcctcccctcctctccgctcttgattactcctcatccaact

SEQ ID NO: 458502 - DNA, 57 bp, Sorghum bicolor
cgtccgcagaacccaagccccaactccacgatgaggccgtcgctgctgagatccacg

SEQ ID NO: 458503 - DNA, 241 bp, Sorghum bicolor
cgtccggtccacagtgcaccaccacttcactcagcaacagaggagtgagcaggatccagcagcagcaatggaggcgcggagatctctcctggcgagcttcgtgctcgccgcgttggccgcgcaggccttggtggccgtggtcgagtccagggccagccccatggagaaggcaagccaaggtgaggacgtgaagaagccggactgcgtgccggggatggacccgcgctcgttcccggggacc

SEQ ID NO: 458504 - DNA, 86 bp, Sorghum bicolor
cgtccgccagatacaagtccgccaagtctagcacttacaagaaggatggagagacttgcaaaatcacctatggctctggttcaatt

SEQ ID NO: 458505 - DNA, 332 bp, Sorghum bicolor
cgtccgggcaaggcagaccaatcgcgaagcgaagccacgccacgaggggagaggggggaggatggggcggaagaggaaggagctgctgtcgtcggcgccgtggcggacgggggaggcggcggatgaccaggacccggcgaggatgagccgcgaggggaaagtcagcgtcaccagcaaccctggcgagacggccaccatgagcgtgccccggagcaagcgccaggaactcgacctcaccgtcgacgacttcgaggaggacgagatcgaccccgagctgcgctacttctttcagcgcaacagcaagtttctgaaaaaaggttttagtgtggaca

SEQ ID NO: 458506 - DNA, 294 bp, Sorghum bicolor
cgtccgcccacgcgtccgcagggggtgatcctgtcagcggactacagcgaagccggagacgggcgcttgttgctggatgacggatcctgcatcgtcgacctcttcgtcttgcccagagaagcagagggcgggtactggcggccaggtacgccggttcttaatcttgctggttatttgatcttgccttatgttgtgagaaaccataaattccatgtgtagctctcaacatacccgaatattatcaattacattgttcaattatattatttgcatagatgttaatatgttattccc

SEQ ID NO: 458507 - DNA, 269 bp, Sorghum bicolor
cgtccggtcacggttgacatcaccgccacgcccgtcgcgaggaccggcttatgcggcaccggcacggcggtggcggccggtggtactggtacgcagatcatccggctgctcgggagcagtgagggtgaggccgttctcctcgccagaccctttgctgggacgctccagtactgcgccggacctcaaggggccgtgctgggactcggccggggcggcgagctgtccaagaacttgcgcacgttctcctacgtgacgagcacaggcaacac

SEQ ID NO: 458508 - DNA, 291 bp, Sorghum bicolor
cgtccgcggacgcgtgggtccaatccgcgcaacaccaccaacctcctcccaatctccatctcggggtggccgccactctcgccgctccggcaacaacccccccgacggcggcggcatggacgcgctcccggaaggcgtggtgcagcacatcctctcgcagctcagcaacgcccgcgacgtggccttctgcaccgtcgtcgcccgctgctggcgcgactgcatgccctttctcccgtcgctctacttcccgcggggcgccttcgaggccgtcggcagcggcgagccggcggt

SEQ ID NO: 458509 - DNA, 239 bp, Sorghum bicolor
cgtccggcttttacctagcagagcaggaatgccgcttggacttggaaagtcagaacaaagatttgaaggtaaatcttgaaaactggaagggaaagtttctggatcttcaagaagttcattgcaaagctaaaagggagaaagacttcattatctcaaatttacttcattctgggattttttttatcataagtaactaagtaatttctaactaaaagagttaatatatgtacaactcttca

SEQ ID NO: 458510 - DNA, 320 bp, Sorghum bicolor
cgtccgctgctcgctaaaaaaagcttctcgagcttataaatacgctcccctccctcccggtgccaagttcctccccccgatccccttccggcccctccacccgccgatcgccctccgctcgctccaccgcggcgggcgatcgctcatctccctctaccctccctccggcgcgcgattcccgagcgaggcgccacccaccgaagatttccgccgacggacggacggctcgctccgtcccctgccttgccgatcggatcgcgtgctccccgaggtagaggtgatgataaggcatagttttttgacttaacctgccttagcta

SEQ ID NO: 458511 - DNA, 203 bp, Sorghum bicolor
cgtccgattcccatggtgaccgacggcggcgagaaggacagcgggcatgcggcggagtggcggttcgcgcaggcggcggcggcggccaaggatgaaggcgcgctggccgtggccgacgataagatgagcatcctggcggcggttaagatcaaccggcgggttgcctgaccgggccggctgcgttccacggaccctggtccgct

SEQ ID NO: 458512 - DNA, 239 bp, Sorghum bicolor
cgtccggttcacgccgccaccgcctgcgcctcccgacgcggttgccgatccgcccattccgccgcaacccctctcccgacgccgcgcgccccagccgcccgtggcccggccatggagcgcgctgccggggaggcgggcgcccccacgccggcggcgagagggggagcggcagcgccagcgggagcgggggcaggaggagggatggtgaaagggaaagtcctgaagggcttgctttacta

SEQ ID NO: 458513 - DNA, 372 bp, Sorghum bicolor
cgtccgtgcgacttaaaactatcttctccgccgcgatttggggcgacttgggctggcaaaagcgttgcttcgcttctcggactactaggttaagttgcgttttcggttcttagaaaaggactggctctgcactcagataatattaaaatggatggtgcacagccaccgagtgggcaattgaacaactcgttcaatactcttatggtttctggagatgagcagagtcaacagccgcaggatgctgggaatgaaaccagcttcacgaattggaaagaccttcccatggagctgcttctgcgtatcatttcactagttggagatgacaggatagtcattgtggcctctggtgtatgcacaggatggcgtgacaca

SEQ ID NO: 458514 - DNA, 190 bp, Sorghum bicolor
cgtccgctcgcgtctgaattgactgccgttccattctatgacgccacattgcatgtactgagcctgaacattgctaaaaactctgtataatttggcgagagttacaaatgcatatatggggtgagttgtaaagaccaaggttctcaattgaatctgctggcatacgatcttggttcacttgatcgatttg

SEQ ID NO: 458515 - DNA, 249 bp, Sorghum bicolor
  unsure (1)..(249): unsure at all n locations
cgtccggccgatctggcactcggcgaagccgtccccaccccctcttcgccaagtgccgccgatctagcactcggcgaagtgcgtgtttcagtttaaaaaaaaaagaaacgctcagccgctccccaccccacgcactcagccggccgngcacgcacgcacgcacccacaccacgcacgcagnctcgccgcaccccctgcgccctgcgcccccgccttccctgcaccctgcgcccccaccgtcgactaccc

SEQ ID NO: 458516 - DNA, 374 bp, Sorghum bicolor
cgtccggggggaagcaggagcaggaaatcagccatcagccatggatttctcttccgtctctgtttgatttgattgggattggttcttggttgctgctttgctttggtcgaaattccattccatttccattgcatcggcagcctccatcccatccagtttggctggattcctctcatccgatccaccaccaccgtcgaccgtcgtcgctgcttggttgcctgcttggctcccttaccttaccttaccttaccttaccttaccttaccttacatgatggatgctcgaatcgccaccccttgtgttggccttggccgccggccccggacctgttccggccgccgattcctcttggacctgccgcttgggcccccggg

SEQ ID NO: 458517 - DNA, 262 bp, Sorghum bicolor
cgtccgttcataatcgcattccttctcttgctgaccggagctgccctgaacgaccagagaggcgaggagaacatgtacttcggtagcttctgctacgtcgtgaagccaggggtcttctctgggggagcagtgctagccctcgccagcgtggcgctagcgatagtctactacgtcgccctgtcatcgtcaaagggtcctccgccgacgtttgcaaccccgcagaaccatggcatcgcgatgggccagcctgtgatcccgcagc

SEQ ID NO: 458518 - DNA, 519 bp, Sorghum bicolor
  unsure (1)..(519): unsure at all n locations
cgaccacgcgtctcgcggacgcgtgggcggacgcgtgggcggactcgagntttcagaaaagtatttagtagaggttatagagagcactatcttaaattgggtttagaaggatttatatggagtgtgggttctatattattcatttctactatataaatattatttctagattatttataatttataatatgacttttttataaagtgtaatggatattgattaaaatttttttatatatatcataatttataatataaatattaaaatatttatataataatgaagtattatttatattacctagatattatatattttataatatatttttataatatctaaattattttgtattatcattaaaatattttttaaatatttattttaattatattatttattattagaaatattatttggtttatattttaaaatttttttatattatttttatttattaaaataaattttattatatatattttaatatttttattttaatttagatattgtaattt

SEQ ID NO: 458519 - DNA, 308 bp, Sorghum bicolor
cgtccgcggacgcgtgggcggacgcgtgggcctttagctagctcgttggtcacatgtaattttgaatgttgatcctctttcttgatttgtgcaatataattattccatgaattgccatgattttgtaccatccacaacacctgctatttctttgttcgtggtcaaaatttatagcatatattctactggtaaaaatgcatagtcagatattttttaaatagctgaccttattattatgagtgatctgatggtgtgtgagagattttgaccttttccacgctagctaaatggacttaatttttgttagt

SEQ ID NO: 458520 - DNA, 140 bp, Sorghum bicolor
cgtccgctcttctttgacgagggcggtggtttggttactaggagccagcttggtgggttcggttgccaccaaagcgcccccgtgaaatctcgcctccgtccgtcatggcagccgcctaccctacccctactctgctcgtt

SEQ ID NO: 458521 - DNA, 289 bp, Sorghum bicolor
  unsure (1)..(289): unsure at all n locations
cgtccgaaaccctaaaccctcggtttccggcggcgtcggcggcggcggctacaagctcttcgtcggctcagcaccatgaggccaccggctagaggcggacgcggcgggaggggaggcaggttcgatggcggcggtcgtgggggcggcggggggccgggggtttggtggtggtagaggcggtggcggaggcaggngcggggagaggtggaaggaccccgaggggtggccgcggtggcggtggccggggcggccgtggtggtggcatgaagggagggagcaaggtcgtcgt

SEQ ID NO: 458522 - DNA, 396 bp, Sorghum bicolor
  unsure (1)..(396): unsure at all n locations
cgtccggtccctctgcccctccgacaccaccgatacaccaagatgacggcgcaggctgcggaggagctcgccgcccagatcgagcagcagaagctcgaggagcagaagactgaggcagaggaggttgtggtgggaggatgaggacgatgatgacgaggacgatgacgatgatgacaaggatgatgatgaatnggatggacatgaaagggatgccagtggcaagtccaagcaagcangagtgagaagagagccgcaggccatgctgagctggcatgaacccatactgtgtcagcgcgtactgtgagaaagcagatatcttntgcattcagcaatggtcagaccgatcgcactcgtaattgcagcaatcagactacttagtgaacagtgaacagtagt

SEQ ID NO: 458523 - DNA, 104 bp, Sorghum bicolor
  unsure (1)..(104): unsure at all n locations
cgtccgaaaaccgcgtccgcgtacaatagcgagcgtncaactccaacccaccaccgcttnccccgttccccaccccgaccgactgcttctnctnccccgcgcca

SEQ ID NO: 458524 - DNA, 255 bp, Sorghum bicolor
cgtccgtttaagtggtaagccaagtcaacttcgcatcctcaaagatattaatttgaccacagttcagatatcattatgaacaatcatcttatctaagcataccttacagttgtgatttcattcaataatcgtgatggttttcccgcgttacaagatcctgcatcagacctgtcctcgaggaacaaaaggaagctacattgggggtatttttttcattattgtatcttgcttctgcactcttatgttattcttaac

SEQ ID NO: 458525 - DNA, 317 bp, Sorghum bicolor
cgtgcgcgctgtgattccgctgataaaccttgtgaagccgcagcgggcagcactgctccgttggaggctcagatatgtacgggtttctccagatgtcgatcagcctggaagtgagagaaaggcctccagaagtgcgcgacgttcccacctacatctggtcaggctaagcaggaggatggttcatgctgctatgcagatgatgggctcacggctgctcctgcttacgagcgctctgtgtccttacctcagccaactttaaagctcatccctgctatgaaaggaggctcgtgaaagaatggaatagcatcaccaacaga

SEQ ID NO: 458526 - DNA, 301 bp, Sorghum bicolor
cgtccgtgtgacccaacagaaaggaggagttagcaatgatattggtgacaacaataagaaggataactcaacagaaggaactgacgtcagcagagatgacttgacaccacagccaaaggataaagataacagcataacaaagccttcacagcacgagattttgggagatccttataaggaggcatcatacatagatgatatgaaataaaatcatcgctgtaaagtttgggagactatacttgcatctgggcacaaggaaccatgtgtagatacgccaatatgattgtgaagcatcagtaag

SEQ ID NO: 458527 - DNA, 367 bp, Sorghum bicolor
  unsure (1)..(367): unsure at all n locations
cgtccggttttttttatgaaaccagtcagtgctcagtcaccttccatctctagtgatgaagtttcagagttcttcccttttctcatgcccatcagcatacccgcgataacaagggtgatgatcaagaccgtggtggtcacctataattcctgaactcttgtatggcgctatcccaaatgagcttttgattgagcctataatgttttccctgccatacaaaatgggtgtttctttatcttcttaacggaggatggggaaacccttatgttagtgactgtcangctcttggccttgcaagggcaaggttctggcttagtacactgcaggcagggctgctgatccacggtgataggctcatcccctgtaa

SEQ ID NO: 458528 - DNA, 88 bp, Sorghum bicolor
cgtccgcgcaagcgcaggacctcgtcgcccatctgccgccgtccatggtggcgcccttctccaacgttgcagctgcggccgaccgggc

SEQ ID NO: 458529 - DNA, 200 bp, Sorghum bicolor
  unsure (1)..(200): unsure at all n locations
cgtccgcatggaaagagtttgatgtaactcaggatgctacaaatgctgaaagtctacaacatggtcctactcttgaaattcgaatacctgcggagtttgttacttccactaatcgtcaagtaaaaggtgctcagcttttgngaacaagacgttatacaaacgattcagatcttggggtgtgctaatgcatactggttact

SEQ ID NO: 458530 - DNA, 166 bp, Sorghum bicolor
cgtgcgcaacctactctgctcccaagatctcctccccacccacctcccggtccggtccggtagcaaagagcggaaagggggcagagagatcgagatccggaggcgcgagcgccaacaacaacaccacgacctgcggcaatggcgggcacggtgacagtcccggggg

SEQ ID NO: 458531 - DNA, 350 bp, Sorghum bicolor
  unsure (1)..(350): unsure at all n locations
cgtccggccgggcagctgcatccctagcgcgccgcgcgcccctcgttttttttcttctccttctcgtggacaagaacacacgcacacacggaagaagctactagctctcagcctcgctcgctcgcaaagtcgccctctcgattctctctcagtccagctccagcgtccagccgcagcagcaagtcccttccccttctccatcaggcnngtgcctccgcagatccgaantggaatttggccttcgtctcacaccaccaatcgaaggaaggaaaggagtgatggggagtgcaggcgcaaggatcagggctggaggagctgtgcggaccctggcctatcttcgaactgcgtga

SEQ ID NO: 458532 - DNA, 405 bp, Sorghum bicolor
  unsure (1)..(405): unsure at all n locations
cgtccgccagagactgtgtgtactccttgctgcggctaattcggttcctacgagagaaggttctatctccaagtcaattgattgacagtgtcaaagatggatgttggatgaagagtactgttggatataggcgtccttctgattgtatcatcaaagattcagaatgggcagtggcatcttgtatcagtgaccaaccattccttgatgtcgagttctatggcgaggacatcctttcatataaatcagagctggagttgcttggtgttattgttgggttcaaaaacaaataccatctttgtattgataacttcaaagtcagatcctctgctattacttctgagtctactgtattaatnctcaaatgcattttcgtatgtggatcatgtcaagatttcataaggaagc

SEQ ID NO: 458533 - DNA, 134 bp, Sorghum bicolor
  unsure (1)..(134): unsure at all n locations
ggggctatggttgccaggggtgaccttggagctgaactgcccatcgaggaggtgccgctgttgcangaagaaattatgagaatgtgtangagcatggggaaggctgttattgtcgctacaaatatgctggaaag

SEQ ID NO: 458534 - DNA, 63 bp, Sorghum bicolor
cgtgcgcgcaacatctcggtgagaacatggtccgtaccatcgccatggacgggacagaggggc

SEQ ID NO: 458535 - DNA, 153 bp, Sorghum bicolor
accgtcgatttccggtcgaccacgcgtgcgcgccgacgtctccggcggaccttcgcgcgccctccgctcccctctaccaccaccgctgccgcgaccccgcctccggagcatcctggttctggcttcccgcgccggcggacgtcctggtggcgg

SEQ ID NO: 458536 - DNA, 97 bp, Sorghum bicolor
cgtgcggagctctcaatttcatgacactacattaaatctcaatctgaatgacactaatcatgctacttaaggctagtcttaatcactcagggtctct

SEQ ID NO: 458537 - DNA, 369 bp, Sorghum bicolor
  unsure (1)..(369): unsure at all n locations
cgtccgggtttctatgcagctaatggacattagtgtcccaacctcatgtgggtcatagctatgcagctcctgctccccaccggatggtcgaaaggattcctctatttggtgtgaggtcaatggtggctcagacatcataagacatggcttgcgacgtccacaatttccttgggttgtgacggtggcgtagtgtgatattcaatatagttgatgggttaatgtaaaaagttagttttttatatgttgngtttatatgcttggatgacatgagtgaaattattggtttctatgtaacttcttttgggtttcaataattggttgacttagtgtctatgcatgttgtgagctaggaacattattccacattta

SEQ ID NO: 458538 - DNA, 289 bp, Sorghum bicolor
cgggcggcagagagccaaagaaacgtatgtatgaaatgtcatcatcatcactgaagtcaaaaagaataagatgtagcaatgatggtgacaagtgccagagacatgaatcaaatgggtgcgcatgacaataacttgtgcagttcccctggaaattcactgcatctaattcctaaagaacatcacgttcctagcatgggaggtgattttgaatgcaaaatgtctcaagatgacaaggccgttatctattccaatgggagccctacaattatgctcatgaatattgcagacg

SEQ ID NO: 458539 - DNA, 364 bp, Sorghum bicolor
  unsure (1)..(364): unsure at all n locations
cgtccggccgaggctgcaaagaagggtgcgccaagggagaactgattcagcacaagtttagatcgtgcctcttgttccacagcatgtcttatgattcacttcttttagacggatgcccggctgttcggatacagggatattttataagaaaagttcagatgaagccgcttggatgaaactcatgccatgtgatgcatggtagtacatctaccatggtggtttgtggcttgtgtgactggtgtcgcagtggtctgttgcctgttggtctgtcagaattattattattttctgaaacctgacaatgctagtcagttaataaaataaaatttttaaattattttaattnttttaatttatttaattt

SEQ ID NO: 458540 - DNA, 416 bp, Sorghum bicolor
cgtccggagaaactgacatacatggagtcggcggttgctgaagccaacaaggctgtgcaggaggcaaaggctgagagttcacaactgaaggagcgtttacttgacaaagagaacgcattgcagagcataacccaggagaatgatgaattcaggatgcgagaagctgatgccatgaagaaaatagaggagctgtctgctctgcttgctgaagccatgacaaagaagcatcctgaggaggaagagaagctggtggttgttgatgaggcgcacaattctgtgcgtgaagaagttatccgttctgttgcagaaaatgaagatacagaagaaactgatgatcaaaagccaaggcttgaagttgccacagccgatatgaactcgaacggagaatcgaagcatgaagagaaagatgaacagta

SEQ ID NO: 458541 - DNA, 293 bp, Sorghum bicolor
cgtccgaacacatctcgatcactctgcgaaacacaagaaattaacacacagcacacaagaagcaacaacaatggcgtcgtccaacaacgtcgtggccaccgaggtgagcaacgcggtgaccaagctcaacgaccacctcgccaccgccctcaccggcagcggcgagaacaccaccaccaccggcaccggcggggccaccaccaccaccatcattacgctggcgggggagaacagcggcgccaccatggatgccgctgccgcttgtggcgacgtggaaggacctcgtcgtcgtc

SEQ ID NO: 458542 - DNA, 76 bp, Sorghum bicolor
cgtgcgcagcgtattactatggaggctacgacagttccatgagcgagtgggatgattatccaagatatctaaattc

SEQ ID NO: 458543 - DNA, 258 bp, Sorghum bicolor
cagccgcggactcgtagggcagttctctgcaaaacatgaaggcgccgaagcatctatcgccgcaccctattcacttcacttcgatgcgatggaactcaataccacggagcgggctttctttaaattaattttcttatattcaatacttatactttattaaattaattcattttattacctctattaattaaatgtttaattctttaattttttatttctttatttatttaaatatttatttatttattttttaaattt

SEQ ID NO: 458544 - DNA, 465 bp, Sorghum bicolor
  unsure (1)..(465): unsure at all n locations
cgtccgaacactgtttagcagtgatagatgattgcataaagcgatctggcctaaactctgcagctcctgattttgttccattatctattaggaaatcaaataccggcgatgctacaggttcctgtttttcatctggagcgaacatatcaggaattctggaggcgatcaagagtttatccgaggtgctatgcaataatttttctggtgaaattgagctagaggagcatgaccactgcctcctccaatcagtaattgagaatcttcagagttgtcttcataaagcaagcaaggttcctgttatgggtgcttttgataagtcaggaggactaaaggctngctatgctcagaatgcagtttcaaaatctgtcacagggagactacatggtagttgcactgctgataatggaaaagcatanttatctctaaatctgggtgatctagtcggttgttggtgacttaaggaaa

SEQ ID NO: 458545 - DNA, 100 bp, Sorghum bicolor
cgtccgcccacgcgtccgggctattgtgaagctgcagatgatgaatacagattctactggaaatgttgaccacccatctatccttgcagaactgaaatct

SEQ ID NO: 458546 - DNA, 144 bp, Sorghum bicolor
cgtccgggagaaccaggccctccaacgccagctcctacttaaacaggaattggagaatttcagaatgggtgagaactgggatgacagcactcaatccaaggagcaaatcgggcaagcctgataagcaagcaagaagcagcgata

SEQ ID NO: 458547 - DNA, 136 bp, Sorghum bicolor
cgtccggaaatccactttgttgtcttacgatgatcctagttctatgtctatttgccaaccctaccagatacctggtgcaaactcatcttctgcatctgtcacatccttttttgagtatggtgcggataattcgttg

SEQ ID NO: 458548 - DNA, 221 bp, Sorghum bicolor
cgtgcgaacacgcagtccacgccgccgccgccgtagcgccgcagtccatgcagctccttcacacggctgcattcgatgcattcacccatgccactggcacaccttcacttcggcggattcaccaattcccactggttcaatggggtgaaccggataatccgattcaccggttccgccgattcaacggcacaacttccccttttcttaacttcccttgttgc

SEQ ID NO: 458549 - DNA, 194 bp, Sorghum bicolor
cgtgcgcccattcatcgagtctgcgctcttcgtctttctccgaattccccccttctttttttgccggatctcggcaccaccttcccacggggccaccccatccacccgggccatgggagccccaacccttggcgctgaccctgggccactgcccctggtccttggccccgccggccgccggtgtgtgtgtgtgt

SEQ ID NO: 458550 - DNA, 467 bp, Sorghum bicolor
  unsure (1)..(467): unsure at all n locations
cgtccggttgctttgaacttaccaccaccacctccacttccgacagaaccacaccgttctgctacattaccatctcaaggtggacacagtttgcccacacagataaatcaccaaactttatcagccagagcattattatgtgcctcaaagcaactatggtccattagctccagctagccattctaaccttcaaatcagcaacactaacaaccccacccctgccattccacaagtgaaccctggacctccaacgaatcaagatgggaatttggcccagctccagcattctatgccactgcatgttgatagagcaagtcangatttctcttctcagttgcaacagcaaaatcttggtcctggtgctgcacaagcccctgaggaggataaaagcaagaagtaccaggcgacactccagttagctcaaaacctactgcttcagaatacagcagcgcggatctggaaatcaa

SEQ ID NO: 458551 - DNA, 219 bp, Sorghum bicolor
cgtccgaaatagagaaaccgagagaaaaaccagacaagggaaggggagggaggagcagtgacctgccacaccacagtggtgggaaggaaaggaaaccaacgagagggagagaaagaaaaaaaaaaaacaggccccccgatctcctcctcccactccgatcgccctaccgatcgccgcctcgtgaaagcttccttgtacccttcccgcccgccgcgacgc

SEQ ID NO: 458552 - DNA, 528 bp, Sorghum bicolor
  unsure (1)..(528): unsure at all n locations
cgtccgtttcactctatccacctgaactgcaagcagacaatatgctaaaatcctatactaaaaatagtttatacacaaaatagcagctgcctatgtaccaatatttgtgtccagtgaatgaaattgtgcagctgcttgccttctggaatggtcatcttaatttgttttggttgtagggagggactataggtggatcatctcgtgcctcagccaacgacagggacaacagcgatggccattaagttgtgcggtgccaggaagtattttgtgaagccaaagtcttttgtttatctactatggctaatagcaacgaccagcaagttcgaaggccgtgcatgtgtcatgctgngtattttggttgtgcgtgggctgctgcatatntagattgtgaagcaacatatgcagattccatcgcgcttcaagacatgtgtgctagttgtggagtaccagattgcttattccctgcaggcatgcttattgcgaagtgggtgcatactgctatcaaactacagcttgctacttatagac

SEQ ID NO: 458553 - DNA, 69 bp, Sorghum bicolor
tccggccggattcccggtcgccacccgtcgtaaacaccctacaacacttcacttcataacttcactttg

SEQ ID NO: 458554 - DNA, 421 bp, Sorghum bicolor
  unsure (1)..(421): unsure at all n locations
cgtccgtgcaaagcttgtcttattattattggttttgtttgctctagagtagaattcatgttaaattacattagactgataaatcagctcaaacctgttttaattttcagctgagatcccagtgttatgtccaaattaaattgttttgcattggcttctgcaaatgagatccttatgtaactcactgttatctgcacacacttacctttccttttcttgaactggcatacgtcataatacgcctttgctagtgtcgctttcatgcttctgcatcattggactcggtctctggttagtttctgtcttcctcagctccatgacattcttctatctggatgcacaggccacaacacggcactagggtctacgatatcnatgagtatttctgcatcagtcagttgaaagcttcatgatcatgaca

SEQ ID NO: 458555 - DNA, 197 bp, Sorghum bicolor
gatcgcaacgcgtaatgcgctgtctgtgagggctgctcccattttcatgcggtgtttggcggagtccagctggcccagcagagagcgcgccggttgtgcattgctatgctgtgcctgaggatacacaatcggctttctttacactagggaagagaaatagcaatctctttttctctcctttgttggtttttttcctt

SEQ ID NO: 458556 - DNA, 364 bp, Sorghum bicolor
cgtccgggctaagggagcaacaggtttcagcggttgtcctactcaatctaatgtctcttgcagtccggctccatggaaggtaccatgctctctcagaatagtcatgctccatccctccgaacaccacttttatatataataatgttgcagtgaagctttccttcttttaaaaaacaatggtaaagactaatgctttagcactaataggttatggggctgattagttgattgatcagtttgggtatcattgatttatatataataatctttacttacccttaattcattggaataaaaaatgcatggttatttttaggtttcacacttctaatggcttccttctggattcaatactggttttttt

SEQ ID NO: 458557 - DNA, 377 bp, Sorghum bicolor
  unsure (1)..(377): unsure at all n locations
tactataacctctagatgattccatgggaactccaaatgaaatgatggcatactcttcnccttgtccaaaatgggacaccggccagaagggggagctgctctgtcccaatgtnagttgctgggaaacaactatccggttcaggattatctttatgagccagcatatgaaccagacttcccagagtatgattcaagagatgnacccgttgctccaacacaagctagtncaaaagtcaatctgaagactgttctaggtgggctggtttcgattgtcaacggtgtaaacaagagtgaggatgacgcatcgcagcaggaaggtttcagcacagacatatcattccttggatctgacaagattggggatgtcaatgtgcacc

SEQ ID NO: 458558 - DNA, 259 bp, Sorghum bicolor
cgtccgactagcatcaagcttctagcaatcattgccgtcctttctaatgcagccttgatgaccgtttccaacgcgacgcagttaagcttccggggctgcattactgcgacgctggcggctgctatgcccggattacaaagctccatgaccgaaaaatcgctgcgcagagacacttaccgcctggacaattccatcaccttggtgagccatgttacaacagttatggccataggcactatgagactatctactatcactg

SEQ ID NO: 458559 - DNA, 509 bp, Sorghum bicolor
acgcgtccggttcccgattttttatagaccccggaacgtggccaccatcagtcgagtaaaaggggatgagtctagaaaaccatacacgcgccatcacaactcttctgtcaacttcattattttttcccaagacaacatgtattctgggatcacccatggcattaaaaacattgagacaagcggcacaatcgcgcaggtagccgaaggtgagagaggtgacaaagatgcttcgcaggtagctggagatgagagaggggacaaagatgcttataggactactaagcacacaggatgtttggaagacctagaggatcaacgggggaaacatcttgtcagtgacgatgaagaaataagtgaggacaatggttatactttgagtaatatacttgaaaaaagcagacactgtgatggttctatatacaggagtatggatatatggtggaaaaaacagtatcgcattgcggaacgtaatgagactcgggtggaggcaatgatgtttcagatcccac

SEQ ID NO: 458560 - DNA, 476 bp, Sorghum bicolor
  unsure (1)..(476): unsure at all n locations
cgtccgcggacgcgtgggcggacgcgtggggtcgaggtcaccgtcaacaacgcgctcagcgccgtcaagccgctcgccgtctactccgtcgacaaggtgctcctgcccttggagctgttcggggccaaggcgccagccgccgcgcctaccgcgtccaagcccaagaagggtgggtccgacgatgccgcctctggccccgcagggtctgacgacgccgcgcccacgggcgccgncagcgccagggccgtcggctggagcgtcgctggcctcgccgcccttcttggctacctgttgtgagagggagaccgtacgccatttctatctatagggacggacgacgagctagttgaagatgagaatgccatgtccggagttgattcgggcggcttcttccatctttgtctgaaaatggcctggggtgtcccttccctctctttctctctggttatttaaaattctttcatttgatctcgcta

SEQ ID NO: 458561 - DNA, 288 bp, Sorghum bicolor
  unsure (1)..(288): unsure at all n locations
gtcgacccacgcgtccgcctagctcggcgctctccaccgncgctagggtttccaccgccgccggcgatgggcgcccttaccgacagccggaagcgcctctcggcggaccactggctntcgggcgaccaccggcttccctaccccttcttttccccggcaggccttaccccttccttcaagcgggccaagctcgccccattccctgagcttgatcccttcaacttcacacggccggctatatcggcctgttcccaaattattcggcttcttcacggcggggcctttctt

SEQ ID NO: 458562 - DNA, 316 bp, Sorghum bicolor
cgtccgcaaggaccaggaagaaattggagctgaaacactggggagcccagcacttgagctggaacctgaagagtctttctcatgtttgccaagatctcgatctcttccactttctttgtcctatggagtcgctgagtcaaatggattagcctctggcactcaggaagctgaaaaggaaagaatcaggaagtcatcatcatttagggaaaaagtttctagcctgttttctaaaaataagaaatcaactagggagaaagtagatccatctgcgagcaatagactcaagcctggaggggctgtgactactggtgatgtg

SEQ ID NO: 458563 - DNA, 176 bp, Sorghum bicolor
cgtccgaccagatgctagtcacgctttatcgagcgatcaggtttcttctcctgacgatggtcagatcagaaatttgggaagcccacttatcgctaaagacgcctctcgtgctggacgtgcttctgaaggatctactcctgaagtgcatagtgcccgtgtagataagaagatgacac

SEQ ID NO: 458564 - DNA, 118 bp, Sorghum bicolor
cgtccgcagcaagctccagcagacttcagcagctacgaaagctagctcttgcttgcaagcgagtgtggagagatggctaggccggctattgtcttttgctgctgcctgctgctggcgt

SEQ ID NO: 458565 - DNA, 60 bp, Sorghum bicolor
cgtccgaaaaaaaaaaaaataaaaaaaaaaaacaaaccaatctaaaagatccaggcctac

SEQ ID NO: 458566 - DNA, 265 bp, Sorghum bicolor
  unsure (1)..(265): unsure at all n locations
cgtccgccaacgtcgatggccctgcccgccctaatcagcaccctcctcgccggcgtcatctggtgcgccggttacctcgccggcggcatctgctncggcttctgattcccactcccccaaccacaaactatcctgtagcacaccccacctcagctttttaagtctatactatactcgaatcctccacgactgttgatcgcgcctggcgctgggaccgcagtgatgccgtggcgagcatatgtcgtgcactgcgcggcgcataatg

SEQ ID NO: 458567 - DNA, 351 bp, Sorghum bicolor
cgtccgggcaagaactagtaaacaacccacctgctaaggaaacctcatgtgtttttgtgagcaaaggagatgacctagaagcagtcagaggcgagctgatcaagggattccttgaaattgatactggaggaaggataattgggataaaagaaatgggggaattggatgagaaggcattcgaggctgcttgtcttgcaaaagtgcctcctgaagaagttggtgcagcatcttctcagttatatgcatcatggaagcagcaacttggtgacctaagttggtatccattcaaggcgatcacaagtgatggcgaccatcaggagatcgagaatattgatgatgatatgctgctag

SEQ ID NO: 458568 - DNA, 171 bp, Sorghum bicolor
cgtccgcagcaaaaccctaaaccctcggtttccggcggcgtcggcggcggcggctacaagctcttcgtcggctcagcaccatgaggccaccggctagaggcggacgcggcgggaggggaggcaggttcgatggcggcggtcgtgggggcggcggtggccgggggtttggtg

SEQ ID NO: 458569 - DNA, 134 bp, Sorghum bicolor
cgtccgggcgcgttggcgcccgtggccggcacgccctacgacttccgcgcgccggcgcccgtgggcgcgcgcctgcagccggacctgccgcacggcctggccggctacgacaccaactacgccgtggatcacga

SEQ ID NO: 458570 - DNA, 90 bp, Sorghum bicolor
cgtccgaacagatctacccgagagcgacagattccacaagcgagagcgacagatcagcatggtggtggcgctgggacctggccggttcta

SEQ ID NO: 458571 - DNA, 313 bp, Sorghum bicolor
cgtccgtgaaggactcggcttgtcagggattgtttctatattatttacggggatggttatgaagcattacacatattccaatctgtcagacaactcacaacgctttgtttccgcctttttccatttactgtcatctttagctgaaacatttgtgttcatttatatgggattcgatattgccatggaagagcatagctgggcacatgttggcttcatcttcttcttaattatattcataggtgttgcaagggctgcaaatgtccttttttgtgcatacttggttaacatgtctcggccacaacatccgggtata

SEQ ID NO: 458572 - DNA, 373 bp, Sorghum bicolor
cgtccgggcgacagctgggctagcggcgccgccaccgtacgtcaggtctccgttgggtgtttgatggcgattagcacctgtaaggtactctaggccactttctcattaaggtagtactgagttccttgcttgaccatgacttctgaagatggagacattttggctcttctgtctgagccaagcctaaaagaagagcaacttgaggcttctgaatctgatgatatatttcctgctattatggaagccattaaatcaaataagaatgtagttgaaactttacctgaggaagctgcctgggcagattcatgctttcgtgcaaacttttgaactgtcagatgatgactggggagcgatgaggaatgcgttgctttga

SEQ ID NO: 458573 - DNA, 109 bp, Sorghum bicolor
cgtccgcggacgcgtggggaagaggggctatgaggtcttgtacatggttgatgccattgatgagtatgctgttggtcagctcaaggagtttgagggcaagaagcttgtc

SEQ ID NO: 458574 - DNA, 496 bp, Sorghum bicolor
  unsure (1)..(496): unsure at all n locations
cgtgcgcagaaaggaaggaacatcaagatgtaaagtttgctggtgccgtgtcacaacttcaacggattttcattgtgacacctgatttccctgttctattggcaagctgcccacttgtacagtttgaggggtcatgcttgccatcgaatgtctctgatcatgatcgagaaggatcattcagtattgggtgccgagttatcctnccacctgagagctttcttacaatgaggcttncttttgtctatggtgttgagacaaaagagggaagtacatttcccctcaaaaactttgagcaacaaccagaactcacagcatggcttgttggaggcacagccttgcaaatcgtatcggtaggggacgtcaccgagaaagaaaccgttatgaagtgatagacatgtcatctaaagcttaactggttttaacatgttctagtcacgtgtcaatgatgtgccaatggatgcaggatggatgatataatcccgcctaggtttacttg

SEQ ID NO: 458575 - DNA, 321 bp, Sorghum bicolor
cgtccggttgaagttcaataaaatctatattatgtaatgaagctgaccttgacaaatttataaatgctttagcaaaatactctgtatatcattaattctttagctggtatgccacttacaaaagaccacacatattgggtatctaatcttgatttgaaatgtctgacttgataaattaagttatgggagataaaaatgagtattacttttccaaggcgttcgatgcggcatttgcctggtctttgaacataccatttgctggtctttagcaaggaatttctggtttgcgatgtcactgttatgaaccttaattcatttggg

SEQ ID NO: 458576 - DNA, 126 bp, Sorghum bicolor
cgtccgggcgtggtaaggtaagtgacgagacaagatggtgcaccagggcgaggagctgccgcaggcatggtggttcgacagccacaacctggcgagggcatctccatggctgaacagcacgctttc

SEQ ID NO: 458577 - DNA, 180 bp, Sorghum bicolor
  unsure (1)..(180): unsure at all n locations
cgtccgcccacgcgtccgatcacgcttcattgctgattggttatgtgttgattgcagactgcaaggattacttcagcaagtccctgtttgtggtcggggagtttgggggcaatgactacaatgcgcctctgttttctggtgtcannnatttctgaatcaagacttatgtgccccttggta

SEQ ID NO: 458578 - DNA, 135 bp, Sorghum bicolor
cgtccgcccacgcgtccgggcagaagattcaaatgactcaaccaatgataaggatgtcatagaagattcaaataattcaatcaatgctgaggtgccatgtagttcagctactgtacagttaaaagaagataagat

SEQ ID NO: 458579 - DNA, 280 bp, Sorghum bicolor
  unsure (1)..(280): unsure at all n locations
cgtccgcggcgagatggggttccttgacgtagtcgacccacacagctgatgcggcggacggcgtcatttaaataattcaatcaatgctgaggtgccgtgtgatttaactactgtacanggaatatattattaaattgaatgactncatgaaggcaaaatttatgaaccaagtgttcacgttatttaacttgattattattgtgaaccattatttaatgcatcagttattatttccaagctttatatcttatcatgacagtataatataccccaagacctc

SEQ ID NO: 458580 - DNA, 249 bp, Sorghum bicolor
cgtggcgaataacttcaataatcctttttagtaattatctagggataaatagaatattagaattacctttatctaacctcttgtgttcaagaggaatagcttaacccttgaactttgagctgtccactgttcaattcatctctggtactctgtatggcattcaagcgagtgttaagctgaggtcagagaatatttttacttatccatatttgttaaaatgatgcgttgtgggctatggtgctcgttgtg

SEQ ID NO: 458581 - DNA, 437 bp, Sorghum bicolor
cgtccgaacgaagctgcatccgttgtaactttcttcctgctcggtggcatcgcgtttatgcattttagtgtcagtccagcactggaccgcatggaggctgacttggacgctcaacgtaaatcatgggccaccatcagggaagagattaagaaaagccatgaaaggacgcgtgcgatcctcgtttctaataaggaaagtcagattgaagctacagatgtttttgaaggcaaaaggattacgggcatcgggacaaagtaagagcatgttgcttaggtggcttaaggtgatcattggaaacaagagttcaaacaatccttggaggaggatgagatgacaagaaatgatatggaactgacaatggagatcaaagacgagcaacttatgtgtgatttttggatttggtatgaaaatgattatagaaacaaaattgtatcttc

SEQ ID NO: 458582 - DNA, 300 bp, Sorghum bicolor
cgtccgcggacgcgtgggccgaagctcaatggacaggaattcttgctcggaaggctcctctcagggtaaaaaaaattcaaatatatccaatatttacggcaaccggaagggtcagtttgattatttccgggataaaccaagactgctgaagcaaattggcagtggcagtgaagctcactcagctcacttgagcaatgcttgctgtttccaaaacctgacagcagataacttttcaagtgctgattgcttaaatgagaaagtattgttcacaacagatgaagacttagtgctacaaccacc

SEQ ID NO: 458583 - DNA, 244 bp, Sorghum bicolor
ccgtccgaatccaggtcgaccacgcgtgcgcccacgcccacaagcagagcaaggaaatggcgatcgcgatctcgcaggaggccttcgacgccatggtccgggagaacatggaggacgtcgggagtggaccccgatgaagccctcgctgacgccgttgaggcgctcaccctccagggcgccgatctctctgggatcattaagcgcgtgccgggagaggccgtcgcggcggatgtgagcccggttg

SEQ ID NO: 458584 - DNA, 165 bp, Sorghum bicolor
gcacacacactcctgtcttcgtctggagtcgtcgccagcgggcggactgagcacggcctgtcgcgcgcagagcatccgcatacggcccgaatagatacgcggaccaggacacccactcaaatgactttactaaaaacacaggagggcttgtgcctgcggattacc

SEQ ID NO: 458585 - DNA, 297 bp, Sorghum bicolor
  unsure (1)..(297): unsure at all n locations
cgtgcgcccacgcgtccgcacgccaacccatctcgctgtggaagctgaagctcaccacccgctcggcgaaatgccgaagcggagccgcgagaactgtggggcactggcggtggcgggcaacgacgaccgcctcggttccctccccgacgacgccctcctacacgtgttgtcgctgctgccctcggaggacgctgcgcggacctgcgtgctggcccggcgctggcgccacctgtggcggttcacggtcgggctgcgcatcgcccgctacgacaacangcggtggagcgtccggtggcc

SEQ ID NO: 458586 - DNA, 398 bp, Sorghum bicolor
cgtccggaagaactggggaaccatgtgatccctccttgtatgagacagaatcaatgtgtaattgcgcctactctgccatctggggactatgttcagtggacaaccgtcctcaattggtttgttgctgtatactaaacctgaactttaggaagctgatagcctataaatgaactcaggttagcagagttccagactcatgtaactccacagctgtcagcaagctctgcaaaatggccatgcagtagagcacgcaatttgtaataaaatgggcattatggttgcccaggttactgaccagaacatatgaaacatataaccactccctccattccaaactataagtcgttctggattttttaggtatataactttattttatatataaatgtaacgtatat

SEQ ID NO: 458587 - DNA, 501 bp, Sorghum bicolor
  unsure (1)..(501): unsure at all n locations
cgtccgtctatcgcatgtatcgtgctcttgctgcgcgatatgacagtgtaactggagaactgcgcaaaaacattccatcatctcttcaatcatatggctcttttggtgtctctgaatcagattctgagacacaatgttcctcatctccagagtacgacatgcaagaaaatatgccacagcaaaagcaaaagcctggaccagatttccttgatatttccattggctctggcgttagctctgatgtatcaaagaagggtagtgaaaggtcttcatcatcttcagattctgattcagagcttgatgaggccaaagaggaaaatggcagtattttttatgccctgagccaaaaaattaatgagctagaagaagagcttcaagaagcaaggggaaagcttgatgctttagaggaaaagcatgcacaatgncagagtgatntgagtaccaacctcaaagttgctgaacatgaagaaaaactgcatatttcaatgtggatccaacaac

SEQ ID NO: 458588 - DNA, 540 bp, Sorghum bicolor
cgtccgcaacggccggccgcggcggcggagcggagcggagcgagcagccatggcgtcgaagcagatggaggagatccagcggaagctgtccctgctggagtacccgcgggcgaacgcccccgcgcaatccctcctcttcgccggcgtcgagcgctaccggctcctcgagtggctcttcttccggctcctaggcgacagatcgcccttcacgcagcagaactggcagggggatagcctggaccgcgacgaggagaacaacaggatccaacacctggcggagatagctaacttcctgggcatcacaccttcggtggacaccgaggcgattcagggtcgaggtagctatgaggagcgggtggaacttctccatcttattgtcgacctagtggaagctagttgctacgctgacaatccagagtggagtgttgataagcaattggagaaggatgtgcaactcgtagattcaattgctgagaaacaagcccaaattttttcggaggagtgcaaacttttccctgcagatgttcaaatacaatcaat

SEQ ID NO: 458589 - DNA, 161 bp, Sorghum bicolor
cgtccgtgaagaatgagcgacttcttggccctgaccatgttcaaacagctgtgtgctatcatgctcttgccattgcattcagctgtatgagcttatataagctttcaattcaacatgaaaagaagacttatgatatactgggaaaacaattaggggaaaat

SEQ ID NO: 458590 - DNA, 94 bp, Sorghum bicolor
cgtccgcagtgggtagagaacacattctatatgctcctgacatgaggttcagaccgcaaaacccttactgagtcaggtgagttcagtgaggctc

SEQ ID NO: 458591 - DNA, 229 bp, Sorghum bicolor
tcgacccacgcgtccgcatgcaatgacgactcctctggaggtggttccctggatgagcaggtggagcacgaagcaatacatcctggcggctctgctggggatgctggccatggtcgccgtggcggccgacatctccatcagcctccctccggcgcacgtcgacttgttcgaccgagacgccaacataacccacgcaaacaagacaagccaggacgggaagcaagtgctc

SEQ ID NO: 458592 - DNA, 496 bp, Sorghum bicolor
cgtccgccctgtattatgcttgggtccatactgtcggcagcaaagaagatgatggcattcactgctggatatagtttagacagttcttagaataatcgatctgacaacataatccattatgattacttgaaaattgttttcccctttgaataggctcatggtttgtcctttctccatccccaacactatttagaatatccaaggcaaccattttttgatttttagttaagcttcaagttttatttctttttctgcttgcatttttctcagaattgttcgttcaaccaatgacaaccctagatcataacttatattagttgaatgatgttgttatggaacttgattatgcatgacatagttatatacatattttcagtacaatgtgaagcatgagaataataattgcttgatgacagtgacatgacttgtgagaataccaagctctgtactaatcttgcaggaactagacatagtggcagggaaatattgtgttgga

SEQ ID NO: 458593 - DNA, 228 bp, Sorghum bicolor
  unsure (1)..(228): unsure at all n locations
cgtccgcgagtactccattggatgggtgatttggaggggtgaatctttattaattgaggcaatccggtaagataacattgatgtgggaccgtgagtatactgttctcgcgggggtctccacctagcttgcctgatctcngagacaggatggcaggtccatcatctcctgctattatcttgttcacataaatgtgcagatcatgtgcacactcaatgatagttaatctt

SEQ ID NO: 458594 - DNA, 274 bp, Sorghum bicolor
cgtccgcccacgcgtgcgcattttccacctgcagaagccccgccgaaaactcagaggtcctgtgcctgtctgaagagtgaagagtgagagtgtggtcatccattcccctctacgtacaactctagcccgatagcttcctccaatctctccctccctgtgtcacaactcacaaatatcaccccactgtggagtgaagtgaacgagctcactcacccacacccacacacacaagctgcttgctttgcttggcttgtgctctcttccacacagcccc

SEQ ID NO: 458595 - DNA, 135 bp, Sorghum bicolor
cgtccggtcctccgtcccggggatctacgccttcttcgccgtctgctatgttgtgttcctggccggttggctctacgtcaccctataccgcaaccgcctgtccggccaccgcatgcaccacctcatgtcgggcct

SEQ ID NO: 458596 - DNA, 235 bp, Sorghum bicolor
  unsure (1)..(235): unsure at all n locations
cgcgtccgaaataccgtatattattcaagccgattccccatctccgccctgcctgacggagagcacgagcacctgcaccgccgtcacgactgctctgagcgcggtacgctgtgtgactgcgaaattgaatatgcaaacctaagctcctctanggnngtccttgcaagggatgattagcgtggggtggcatcctatgggggaagggtaaaactagattttgtttggggggtggctt

SEQ ID NO: 458597 - DNA, 163 bp, Sorghum bicolor
cgtccgacggagggaagcacccagcagcacaccatcaaagagtggaccttccagacgttcggcttcccgcccacggccaactcctcctttgaatccaatgccaccagcaactcgtcagagccggccaccgtgccagtctccaacgccgccaacagccacaaga

SEQ ID NO: 458598 - DNA, 243 bp, Sorghum bicolor
cgtccgcggacgcgtgggtcggacgcgtggggggaagcttgcacctaacgaatttcagggggaactttcagtatctcgaatcttgaatgtaccctgggacattttgtgcatcattaacctcaagctgcatttccagcgtagagaacagtgtgactgtggcagatgcaaagtgtggcaaaatgcttgtgcatggtgggagggagttagctgctatagctgatgttgaagaggatctttgaattg

SEQ ID NO: 458599 - DNA, 317 bp, Sorghum bicolor
cgtccgggcgagatggggagaggcttgagcgccgctcccgtctcgccgcgcctcgtgctcggggcagcggcgctggtgctgctcgcggcggcggcgctgccttctccagcagctggggtcaacgtgacggccgtgctctcggcgttccccaacttcgccgacttcgcgcggctgctggcatccacctccgtggccggggagctgtccgggaggtcgtccctgacgctcctggccgtgccgaatgccaacctgccgcagtcacccttggctttcgtagctggcgccggcgccgacatcgtcgacgtgctgaggtacca

SEQ ID NO: 458600 - DNA, 113 bp, Sorghum bicolor
cgcgtccggggaaattcgcatttcctagccggcgcgcctcctccactcgtttttaagtcccaagtcccaactcccctacccaatccaccgccaccatgagccgcgatcgctac

SEQ ID NO: 458601 - DNA, 119 bp, Sorghum bicolor
cgggcgggcgagatggggagaggcttgagcgcctcttccgtctcaccgcgcctcgtgctctgagcagcggcgctggtgcttgtcatttcgggtcctaacaaagattcccccattttcgt

SEQ ID NO: 458602 - DNA, 231 bp, Sorghum bicolor
ttaatctccacctaactaatttaattcgaaccttactatctctaatctttcaatgtgcgcctgcggtccatttctttacattcattcaccccccacattctcgttttcttccattcctttccataaactaagttccttaactctctttctacacctctcttacacataaagcttttgcatttacaaataatatcttgacactctcttctctccatccttttttctattttc

SEQ ID NO: 458603 - DNA, 538 bp, Sorghum bicolor
cgtccgcccacgcgtccgcccacgcgtccgtgatgcttcatctataaagattcttcctacatacctttggtcaattttctattagaattggaaacactgatacaggttttgtgatgagcacaggaaagactcttctcaaggtatgtccatagtccttgctactcccagataagtttttaaaattagtcttagacaatgacaggatggaattgtttagtaaaatattattgttgattaaataatagaaacagtgggtgtcatatctaatatttcagttagcactatattttccttttagtgaaacaatacatgatgtcttcttttcattcactaaggtaggatcttttttcccctcaattctgacatgtacatccaaatctatccaatatcaacattgtcttcatcaatgttgtttagcctatcccttgctctcttagtgctctttctcattgccgtagttgttgtggacagattcacccgactcctacacgttgcattcttccaccagcttgcaacaatcaaagaccacatccaagac

SEQ ID NO: 458604 - DNA, 466 bp, Sorghum bicolor
  unsure (1)..(466): unsure at all n locations
cgtccggccatgggctatgcccagtgggagctgcgctactccatccctctcgggctcccgccgcatcgtctctgccgcctgatggctcttgttgctggtggcacccgaattctgctgtggagtgatttcattctctacgaatatgatctggcaacctctaagctgagcaccgtgtgtgagatggatcgaatgaggtaccagggtcgtcgaacgaggaaatggaagaacctctggagcttcaactntgtgccctatacggagagcctccttcggatcggatcactgctgcctaataattagcttctttagctagccatgagatgagaattgtgatactttgtagctatgattaccattgatgtcatgagaacaattctgtttggattggagtgcttgtatcttcctcttcactatntattctgtgactcttctttaatcgtatgtgagaataatgcanacatgtgta

SEQ ID NO: 458605 - DNA, 115 bp, Sorghum bicolor
cgtccgggagtgtatggttgtgatggcagctatcgagctatccttgggtctggatcgcacatgtttagctatgggctatacgggggggggacctcacttggtgagaagaatgtcc

SEQ ID NO: 458606 - DNA, 379 bp, Sorghum bicolor
cgtccgcgcgccgcaacccggaggccggaggacactgcgctcagtcgagcaccacctggggctggggcccagcatcctcgcgaccatctccggcacgacgtccgccctctgcagccccggtgtccctgcgaccgtcgctgctgtcctacttcgccactggccagtttgccccgcgacgagcaccaccagaacactagggtcatctgcacacctgctgggtctgcaacaatgtctggaccttcatcctaacagttgcgaccttcaagagcgcagagattcaagaagcactgagcaagatggatctcaacgccgtggtggccacctgctacgcccttccggtacttgtctctgtgttcacagtccgcttcttctacgtgct

SEQ ID NO: 458607 - DNA, 411 bp, Sorghum bicolor
  unsure (1)..(411): unsure at all n locations
cagtcagcggcttctaacttatctgtattaaatcttaaatgtgctcagccggttagtcgtagaagctcaactgacatgagtggtgaggtttgaccgtcccagtatatatccatcgcacgttctgaccaacagatgactgccttatatctctgcaatgctggcagatctattctgctatcatgttgaaccagcttttgtttttgatgtgtagccaatatgatgtattcataaatttaagtaggtgtgtcctaatatgtacctttaacaatgaaatatgtgtgccttgagtagcanagatgtcatgcaacttttactttaatttgctctgccccaattgttttttctttgtaggaacaggaggggcgagcccctatccttttatttgctcttttattcccactttttttttag

SEQ ID NO: 458608 - DNA, 89 bp, Sorghum bicolor
cgtgcgacgcaggaaggctaccagggtcacaaggaatggctgactgaagtgaattaccttggaacgctttcgcacccctatcttggaaa

SEQ ID NO: 458609 - DNA, 416 bp, Sorghum bicolor
cgtccgctattttgggcatctctttgtacaaagccgatgggtttggccaccccttggctgtagccatggtagcagcttttttctagttgtgtgatcccagttagtgagagatagtagtatttattgcctactcgctttgcttattaggtcagacagcttgccattgaagttagcttcgtatggtgttgcttgtcatgatttcatccattctctactttggtcatcgactttggttttccagtcagacgtgcttatgatcattgtttatgatgtcaataatcacataattgtgcagtctaagattgtgcttactgcctgtgaagtggtaaatatgttcttgttcattataggcttgtgatcattgtctttgaccgttgcttctgatgtcaaattacgaactgttgtttctgagcact

SEQ ID NO: 458610 - DNA, 490 bp, Sorghum bicolor
  unsure (1)..(490): unsure at all n locations
acgcgtccggtaaatataaaggcgcagtagggtnggggtcgatctatcgagatgtcgtggagcgagaacgagaacagcaggttcgagctggcgctggcggatatcgaagaagacaatccggggcgacaaggccatcgtgcccacatncgacccggagacagtctacgacatcaagtacttcacccgcgaccgccgccggaactcgccgcccgtgcggcgcaccctgctncgcaagcccgagctcgagcgctacatggccaccaagcagttcgaccccaccaaggacttccccgtgccgtacgtcaacaccaccgtcgaggaggacgacaacacgatcggcggtggctaccagaagtgactcangaaagcttgctgatttgatgctggttaatttgtcaggcatnctttgcttggactccgtcagaagctgcactattttgattccagctattaaatatccctttttcttttattccaagtggaagtttac

SEQ ID NO: 458611 - DNA, 369 bp, Sorghum bicolor
cgtccgcaacacaggaagagtagtttgccaaaacagtacatgcatacagtcctacaagacagtgaagatggatcttccctaaatacttgatagtggcagctacattgtactggaacagctgtgctgcatgtatatgtgtcattctcttggcatacggttagtgattgaacctctcgaagttgcagctgaggcatttgattgcaactttgtcatccacgaaggtgcatacacttattgttcttagttttggggcacattgaagcagagctaatttgaataccgtagactagtgtgttcacacaattactgtgttgctccggccaatgctaacacaatgataacttgtatcagagcaagttttgtttttaa

SEQ ID NO: 458612 - DNA, 338 bp, Sorghum bicolor
  unsure (1)..(338): unsure at all n locations
tacgcgggccgcggtccgcgggtcgacgcacgcgtccagagacccgccacgcgtgcgcgaagcttaagctagctagcaatggctgcggcggcgactcctcctggtgggcgtcctagcagcagcagcatggggnngnttttcnnccgggggggggnncccttgctgctgctggcggcggcgattgccggcttcgtcgccgacgcgcantttttttgtggtgtctgcttcgggtcatgtatttggtttagccgttcaaccgcgcctacaccaacaagtggggcccgctggatcagacgcttttcggcgaccatatcgccctcatcatctgggttgacagg

SEQ ID NO: 458613 - DNA, 344 bp, Sorghum bicolor
cgtccgcccacgcgtccgctcaatttgatgttacgctggaagtttctttgtttcatatggatggagctatgatatttatctttaactgttgcatactatgatgcaaactaatgtgatcatgcaagtctttatgagtcggttgatcatgcaattcttatctggaatatcaacaggttgattcaagtaatatttttagtttgccaatcatttcgatgaagaaaacaatgatcatctggttgatctagctgtacatagtatgtgacatagcttaggctatgacagaatgtctagcgtcataaaatactataaaatgtctattctattgacagtgtaaagctgaatta

SEQ ID NO: 458614 - DNA, 385 bp, Sorghum bicolor
  unsure (1)..(385): unsure at all n locations
tccggtcgccacgcgtcggggacaccatgtggtactatgctaccaccgtattggaactggaacctataagtgccacactcttctatttgcatgagaaaaaaaatgaaactatgtattttattgttctcaaattttactagaatatacatcaatagatctattggtcattgaaccctatatatggataaaaagatatctcattccttgattttttattagggtttgatatactgggaaacacactacttacattcaggctgggcaacctatgtgttccctccttgatactcanacaagggatcattcatgcaattaagcactaccatgatttgagaacttgatgtaggattttgtattggttcttgggtcaagaaaggagattcct

SEQ ID NO: 458615 - DNA, 529 bp, Sorghum bicolor
  unsure (1)..(529): unsure at all n locations
cgtccgctcttagggagaggatgaaaagcattcaagctgcagctataggtcattttgatggagctcaggctcggccgttggcaagtatgaacggaagtaatgtgctgcatgggggagcacggttggacggtgaaccccaacaacaaagcaatattccacccatggatgagcgagctctatctgggctgcaagcacgaatggagaggctaaagagtgggtctatggaatcactatagatacgaagagaaataccaaccatngtaattcattgtaaatttgaggcatagtgatgctgttgtttgtagataggtatttgaatgtcggaagaactacatggcacggngccgacatttcgtaacccctgtgcctggttaagccattcttgcagagcctttgggtgcagttttagataagagctagccagatgttttccttgtagctactccatgaaggactaattagtgttgacacattttgccgtactgtattggttttcttgtggtgtacagcaatagaatttttcattctc

SEQ ID NO: 458616 - DNA, 61 bp, Sorghum bicolor
cgttcgatttagccgttgctcctgagggggaggaggcagctgtggtcaacgtggaagagcg

SEQ ID NO: 458617 - DNA, 501 bp, Sorghum bicolor
  unsure (1)..(501): unsure at all n locations
cgtgcggtttcacagacttcaggattaccccctaaactcccagtaaaaaagaacagcaaaagtcaaaactcttatatccgcaagggtaatgccctaattagaaacccagccactggaaatcttcattcttctagtctagattctcaaaataagagtaagcctgttatgaggagaagcatgaactttgtcaggaaagtcgattcaaaagatgtaggacattctcatatttcagttgaaagacccaagaccccacctttgccacttcacaccaagtccatcagttgtgatgtgaatatnttggagccattgtctcaaaatttgcagcaacaggtcattgaaactgaaaaggaagattccagtgggcaggttaactcaggtgctgacattccaagcattattagttcgcacaagtctgaagcccttgatgctggtaaagcaatttatgttagaccaaaggtaaatcaagtagttgttgcacaggggcaacatcnttgtgagtcg

SEQ ID NO: 458618 - DNA, 71 bp, Sorghum bicolor
cgtccgccgaagaagacatcaaaatgatacttcgccatgagtagtactggaggattatgaattatctgaag

SEQ ID NO: 458619 - DNA, 119 bp, Sorghum bicolor
  unsure (1)..(119): unsure at all n locations
cgtggcgtttcagcctctgggactgaaggggatgaggcagctgtggtcaacgtggaagagcgccatttnattttaaactttgtgggcatgtgccccctactcagtgaccaacattctac

SEQ ID NO: 458620 - DNA, 171 bp, Sorghum bicolor
  unsure (1)..(171): unsure at all n locations
cgtccggcgagatattaaagcattttccttatagagatatatataaaaaattagaacacaaaggttctttcttttcgcgactccatctgccaccagcaacctagttcgattcggacgncgtagcgtatccggatagttccactccgggactctctcggtcgacgagagggt

SEQ ID NO: 458621 - DNA, 71 bp, Sorghum bicolor
acgcgtccgacggattcagccatggacacaatcttcagggcggctccagcgtatagaggagaaatacacct

SEQ ID NO: 458622 - DNA, 74 bp, Sorghum bicolor
cgtccgtggaattcttggcctcggatttcctgaaatttctgtgggagaagcccctccaatttggcagagcatga

SEQ ID NO: 458623 - DNA, 127 bp, Sorghum bicolor
cgtccgcggacaactgtttgtctttcctcctggaatcatcagaagtcaaagacgatgctgcttatagagcaccagaaaatatgaaatccaacagaatgctgaccccaaatcagacatatatgctttg

SEQ ID NO: 458624 - DNA, 59 bp, Sorghum bicolor
cgtccggcttatccaatttgtcattgcaatgccacaacttgattgatgtggatcttagt

SEQ ID NO: 458625 - DNA, 87 bp, Sorghum bicolor
cgtccgcccacgcgtccgaggaacactcacctagctactctctcgcttactagaaggtccaagaacactagagcgacaatggcgccg

SEQ ID NO: 458626 - DNA, 110 bp, Sorghum bicolor
  unsure (1)..(110): unsure at all n locations
cgtccggctctcgtcattacattgaggatgagaagcctagacagagaaagtataaccatggctctcgggcttctgaggatgagaagcctanaaagtacaagaaagctttc

SEQ ID NO: 458627 - DNA, 91 bp, Sorghum bicolor
cgtccgcagagatggttcaaacatgtcgaagcatggagaaaccagtcattgtcgctacaaatatgttggaaagcatgattgaccatcctac

SEQ ID NO: 458628 - DNA, 78 bp, Sorghum bicolor
gtcatgtgtaacttactgaggaatgcagagaccaattgggcaagacaacatatctgatctgacatcgtcatgcatatg

SEQ ID NO: 458629 - DNA, 214 bp, Sorghum bicolor
cacacacacaacagcctctagctcccaccctcggtatgtctgtgtcccatgtgcccatcagctcgactcatagcttcgcgagcggcgcgcgcgcgcgcgcgatgcacacacctgaggaccgagctcgctggctgcaggtcgggtcgcgacgcgtgtcgggtgcaccgtaccaccctggagctggtccggcaaggcgccagcgcgggtttttgac

SEQ ID NO: 458630 - DNA, 277 bp, Sorghum bicolor
  unsure (1)..(277): unsure at all n locations
cgtccggcacaagaagattaatgtctcaaatcctagagtagcatgggaacacgaacagttctcaaggtttagagtgactgcacttactctntcagaaatgtctacccctcctgaatttttggaaagcactggtggtcttcacgacactagagaatctacagatgttgagtcagtaacccgaactgtgagattagtttctgagagtcttgcgagacacatctacggattgaaaggaaggaacatcgacgtttttgcagagaatagcagcttagcaatt

SEQ ID NO: 458631 - DNA, 352 bp, Sorghum bicolor
cgtccgctttctattattcacactgaccttaagccagagaatatattgcttgtgtctaccattgacccctctaaggaccctcggaaatcaggtttacccctggttttgccttcagcgaggacagacgagccacctccaaaggtgcctgcacaatcaggaaatggtggcctcaccaagaaccagaagaagaagatccggaagaaagccaaacgtgcagctgctgcaacttcagaaggaagtagtgctgtggcatctgctgacacagatggatcagatgaccgaggagatctgggtacaacaaatgagggtagtcctattcaggatggagctaagaagcggcaacacgagatag

SEQ ID NO: 458632 - DNA, 265 bp, Sorghum bicolor
cgtccgtgctattcctctcttgttcggctaccccggccgggaagggaaggcagccgtcctctccgcacctcccctgctctcctcgacctccgacgcaccccagacaccgcagagatgcagaaccctagcggccaccaccccgcgacggccgccccgtcgtcggcgccgtccaagggcaagtcgtcggcgccgaaccctagcggccaccacgccgcgacgccggcgccgtcggggacgccgtcgaagggcaaatcagcggcggcgc

SEQ ID NO: 458633 - DNA, 447 bp, Sorghum bicolor
cgtccgatgaccttgacaaaagcaatgctcagaccttccaactagagagaaccgctgattcacgggttgtcaacatggttcagcttgacttctgctcaaaccatgggaacttggaacttacatgcatctatcgcttcagggtgcatggcagagagcctggctcactcaacactggagcctgatctgagacatgcataccaaagcgtgacaagattcttgcagcatttctgctgatatgagctttggttcagtgtttcgtggtagtcggagcacatcaagccccctaccacagacagttcttgaacaggaggaagaatgaatggaataagatgaggcaaacgaatgttcaggtcatgacaagggaccagcgccagtgcaccagtattgactatgttcttttcaaaaaaaaaaagtatggtaatgtggttttatctgttgcacatgtat

SEQ ID NO: 458634 - DNA, 361 bp, Sorghum bicolor
  unsure (1)..(361): unsure at all n locations
cgtccgcctccttacacacagcggcggcggcgagcggcgccgggatcacgcagcagcggagctccagctcggccagcacagcggggtcgcagcgaaagagcgacggcagcggcgtggccaatgcgagcgcgagggacgggcggagaatgctggatcccgtgtgggagtggatccaggccccgccgncgncgcgctgcttgtgcttagcaaccgcgttggctcgccggattcggttcgatttgtttggtttgtttgccttgtttcccttctgctcgacaacgattcagtgcaatcggagctggatttcgtgaatcagaggaatattgattcgtgggtctagcccgcgcgatgcttacagtta

SEQ ID NO: 458635 - DNA, 103 bp, Sorghum bicolor
tattactcatttcggctctactctgaataacgatacgtcgaggcgcgtggcggccctaacaggtcactgcgcgaacacctatacacgctcatacacatgtcag

SEQ ID NO: 458636 - DNA, 236 bp, Sorghum bicolor
  unsure (1)..(236): unsure at all n locations
cgtccggatgaggggttggaggaagattttgtcatcatagctaaccgggctgagggggaggagttggaggaagaagacacagaanaggtggaagagtggaatggtgttttgagtgatgtggaagaggaggagttcgattttgaggaggtgagccaaagccaaagtgagacgatgctggataacaatttatctgttgcttggagagtttgaacatgatgatatacaggctgtaagat

SEQ ID NO: 458637 - DNA, 230 bp, Sorghum bicolor
cgtccgatcatccgcagccacccctcaggactcaggagcttcgcacggcacgccgctccgcagtcgggaaccatggcggttacgccgctccgcacggcggagggccacgacggcgtagatccggaccccatccggagagctctgagaggcgtcagcagcgttctcggtcgcgtggcctgcgcgctcgcccctgcggcgggctctttaggcaccgactgcagctgccgtcg

SEQ ID NO: 458638 - DNA, 269 bp, Sorghum bicolor
  unsure (1)..(269): unsure at all n locations
cgtccgcccatcgccatggccaccaccacgctcttcctcctcctctgcgccgccgcggcactcgcatcagcggcagccgccgccgacgacaccgggttcacgaccttcaagctctacttccacgacatcgtggcggggacgtcgtccccaaccgcggtgcggatcgcgcaggcggcgtcgtccaacacctnctccacctncttcggcgccgtggtggccatcgacgaccctctcaccacggngcccacgcggtcgtcggcaccgagatc

SEQ ID NO: 458639 - DNA, 407 bp, Sorghum bicolor
cgtccggccaaaagtggctgtgggtggtgcggccatgatcccaggccagatctgggcgtcgcgatggaggatgccagctacgaaggcgtcgctgccgcaaaaaacaggatcgtacgagggctacatcatcgtcaaggcggcctccacggatggggagggagacctagccttcttcgtaggagatcttggggatcttgccgcccctgctgaggacgacactgtgccgatgggttcgaggtgccaatgatctatcactgctcctaatagcataaatacatgtaaaactgacacggaaggatgatagcttgaaagatccaacctcttggaaatatcaaagttcagatatgagatgcaaatatattttctcagcctgattcgtgggaggtgagcaaggcttctgatagatt

SEQ ID NO: 458640 - DNA, 61 bp, Sorghum bicolor
cgctgtcgctcgcgcgtctgcctgcctcgggaccgcgcgggcaactcactcgcactcaaca

SEQ ID NO: 458641 - DNA, 130 bp, Sorghum bicolor
cgtccggccaagtttgtgtcttacggctgtgttcaaggaggctgcttctcctgttcctaatgctggagcttctcaagttcaacagccatcaatgtacccatctgttgacgagttgctgttcccccgtaat

SEQ ID NO: 458642 - DNA, 261 bp, Sorghum bicolor
  unsure (1)..(261): unsure at all n locations
cgtccgctgaagttcgtctgatgatgaaccctgtcacaaagaagaataaaggctttgccttcctgcgatatgcaactgtagagcaagcaaggcgtgctgtttcagagctaaagaatccactggtgcggngtaaacaatgtggcgttgctccaagtcatgacaatgatacactctntgtcggcaatatctgcaaaacatggacaaaagaacatttgaagggataaactgaagagtatggagttgaaagtntngatgacttac

SEQ ID NO: 458643 - DNA, 96 bp, Sorghum bicolor
cgtccgcggacgcgtgggtcggacgcgtgggtggcgatccggtactggccgatggccgcggcagccgttgggttccgcctcgtcctggttctcttc

SEQ ID NO: 458644 - DNA, 117 bp, Sorghum bicolor
cgtccgctagtactggccacatctaagaattattttgaacgcggtataatgaaccaaagtagtagagggaagatactgacaaacttatgtctggcctagtcaagtttcaatataata

SEQ ID NO: 458645 - DNA, 249 bp, Sorghum bicolor
  unsure (1)..(249): unsure at all n locations
cgtccggtgacaaatatacttcacaacatagttggaggaatgagaaattgagaatcccttgcgtgacctgttcttggaggcaaactcatgattctggaaacgtcatgcttgatttgaggatttggggtttttacttgtatttattggaaggccatacaacttttgtactctgtagtctgtactacctaacttcgaaatttgaaatcagctagcaattacaccaagatttttatcttcnaaaaaaaaata

SEQ ID NO: 458646 - DNA, 53 bp, Sorghum bicolor
  unsure (1)..(53): unsure at all n locations
cgtccggacgaggtgttctgcctgttcgagggtgtgctggacaacctgnggcg

SEQ ID NO: 458647 - DNA, 206 bp, Sorghum bicolor
  unsure (1)..(206): unsure at all n locations
tatatcctgngatcaagtgcgcacagagttttccaggacaaccattacgggtgcaagttgttccagtgttgaccactcctcagttgattcaggaattagaagaacgtctcctgcgtgtattcactggccaagtaaggcttgcccaccaagtcctgcagaaagttgtgacccggtacctccgtcgcgcaatatcttgatatctagca

SEQ ID NO: 458648 - DNA, 110 bp, Sorghum bicolor
cgtccgcttgagttcctgcccatggacgccgcggcgtccggcggcggcgacgcgagccagctggtggacctcgcccgcgtggaggtcggccgcgagtacgagctggtgat

SEQ ID NO: 458649 - DNA, 254 bp, Sorghum bicolor
cgtccgcccacgcgtccggttacatcttgtaggtgaagcaaaattagggatgcaaggccttgatattgcagtatttattctatttctcgcaatgtgttctgccatcaataattttagtttcagatgacataatggcaagaaacatatcccttcatgtttggttcgttggattgatcaaattcctactcctaaattctttgttgcatgctgattgttggtgcttactgtcgtataaattgatattgcatttttta

SEQ ID NO: 458650 - DNA, 101 bp, Sorghum bicolor
cgtccgcagctgcaggcgcctgctgctctccgacgagaccccaagaactcgccaacctaggccagccacccttcttcccctctgccgcaatgacaatgctg

SEQ ID NO: 458651 - DNA, 338 bp, Sorghum bicolor
gcgtgggccagttcaccgaccagtggccggcgtccggcgacgatgagcacccgcgccgcaggatccgtcctcctccgccacctgggcccgcgcgtcttcggctcggtttcctcctctcccgcggctgcgccgccgaggccactgctggccctggccggcggcggtgaatggcgcggggcggccgtgtgggtgcggctgttgtccacctccgccgccgaggcgaatgaggaggcggcggcgtccaaggcgaagctgggcctgctcctcttcaagaagcgcgcgttctccgcggcaggcgccggtggtgctacaactacaagccgttccggcactacaac

SEQ ID NO: 458652 - DNA, 52 bp, Sorghum bicolor
ctcggtgtctgaggtgtgaccgcttggctgtgctctttgtttggctcctgct

SEQ ID NO: 458653 - DNA, 335 bp, Sorghum bicolor
cgtccgtcgacccacgcgtccgcccacgcgtccgattcagcgttggaggaggcaaaagctgatatagttggtctctgggcactgaatttgcttattaagaagggattgcttcctaagagcctgtcacaatctatgtatgtctctttcctggctagctgcttccggtcaatccgctttggactggaagaagctcatggaaaaggacaagctctgcagtttaactggttgtatgaaaaaggggctcttgtcttgcactctgacggaaaattctcagttgactttacaaaggttgaggaagctgtagaaagcctgagcagggagatactgacaataca

SEQ ID NO: 458654 - DNA, 419 bp, Sorghum bicolor
cgtccgaaagaaagtacggaaatcaaagcaagactttggcgggccgaaccccttccaggaggaggcagactacatatcagagcggaggatgaaacagaaatcctaccagggcaagtcttggaacaagcctaacactatagaggagttgagaatatgagagagaatccccgggacgcacatgctgtttgtttgttgttacttgtagcacccattggtgaaagagattatgtaaaaccattcgtcgtcgatagtccatagttgtcgctattctgttttagcagtttttggtagacatttgaacattgtgtttggttgtaacggactgtttaagcggacagacaaagtgagattattattttatcgcaacctgctgttggtgaagtactggataaataaaatgatggtgatgatcaattggt

SEQ ID NO: 458655 - DNA, 138 bp, Sorghum bicolor
  unsure (1)..(138): unsure at all n locations
tccgtcgatcccgtcgccaccgtcggtttctggctcgagcgctcggtcttgcttggtgccgcgcctgggccgagcttgctgctgacggcttcgctgtcgcggccagctcntttctcgattnncgcgcaccgaagaggc

SEQ ID NO: 458656 - DNA, 135 bp, Sorghum bicolor
  unsure (1)..(135): unsure at all n locations
nnanaaaaaaaaatggaaagagaaaaaaaaataaaaaaaaaaaaaaaaaaacaaaaaaaaaaaaaaaaaaaaaaaaaaaaaaaaaagaaaaaaaaaaaaaaaaaaaagggagaaaaaattgggggcggccgtttt

SEQ ID NO: 458657 - DNA, 102 bp, Sorghum bicolor
cgtccgattcagaaccgtgagggagttgcttctgagaaaatcagcaacgaacatttcactgttgacgatcctgcaactaccttagaatctaaatgagctctt

SEQ ID NO: 458658 - DNA, 378 bp, Sorghum bicolor
gaggtacaagaattggtagtacttttatattggcccccttctcctttttcttttgcttctgatgttgtaaagctatctttccatgccctacttgatggctaaactaatggtcctgatagatcagtttaggaaaactgggataacatatgtgccaatgtgtctcttagttttgaaatgccttatttgaagttcttttatacatattgatattcgccttaaaattcttctgatcctctttaattagtcatgatgtagatgcaatatccctttcacacccttttagaagaacatagatgagaagaccactttctctcccttttagaatagcattgatggcatcaatgacatgattactttctcatccttttagaagaacat

SEQ ID NO: 458659 - DNA, 442 bp, Sorghum bicolor
cgtccggctctttgggtgcaccacggagaacaagtttgggtacatcgtgtgcaaccctgcaaccgaggaattggtgaccatacccgccagctctggttcttgtccgcctccttcgcttactccattggaagacaaaactatcgctgtctgtgatggggatatatatgcacacacctatctgatgtttgacccgattgtctcctcgcgcttccacttggtccagttctggcaggataggtcgacgtgtgaggtgaaaaaggtgcactcttactcgtctgaaaccagggcatggagtgacacgtcaaacaagtgggagccaggtgaagagcgctgtggatggggggtactgcggggtcgtggtgaagccataatcgaattcacgcgtggcaaggctttggttgatggtctgttgctttatatttgaagctgttcttcttttcat

SEQ ID NO: 458660 - DNA, 237 bp, Sorghum bicolor
  unsure (1)..(237): unsure at all n locations
acgacccacgcgttcgtccacgcgtgcgggtggacgcacccaacgcacttgcctccgacgccgatcaccccgtcccgccgtcccgcctcctttctaagcaccgnccgcgccgtcgcgccgcggcccctcgcccgcccctgccaccacctgcgccgccagcgcccgcgcgtgggctgcccgatctcagcctgtgccactgctgggcgtccgcttcaacgccccaccgggaccggccag

SEQ ID NO: 458661 - DNA, 487 bp, Sorghum bicolor
cgtccggctctttgggtgcaccacgtgataacaagtttgcttacatcgtgtgcaaccttgcaaccaatgatatggtgaccataccggggggtgctacttcttgttcatatacttccttactttttataatgtcatacttatttgcatgctttattggtataatcattaatctcttttatatttgacaatttatcatagttatttaatatttttaatatttctttatgatcttcatttatattttttattaatatttttattgtattttatatttatttcatgattttttgttttttttattttgtttaattttttaatgttttatatttttttttaagtctatttattttttataatttttttatttttttatttttatttatctaatttattcattatattattttttaattttatattattgttatttttttttttaatatttattattatttttattattttaattttttattttttatttttt

SEQ ID NO: 458662 - DNA, 383 bp, Sorghum bicolor
  unsure (1)..(383): unsure at all n locations
cgtccgggagctggagtccatgacaatgcctaccattggacatcctccatatattatggaagagatagcaaggagctgcaagaatttcacagaacttaagatcatgggctcatttgatcaacaatttgcctcggcaattctgcagttccttccaaagttgaaagtgctgagccttcgttgctctaaagtgtccatggatgcactccagtgcttgctgaactctatggaatatnctgaggttctgaatatttcgcactgcctgctattggtcattgcggcaaatgggcggaagcaagtggttcatgaactggacagccaaattttcgagagagcttcacggctgcgtgaattccactacttggcgaagtaggttgtgcgtcgca

SEQ ID NO: 458663 - DNA, 132 bp, Sorghum bicolor
cgtccgcccacgcgtccgaggaaaacgagtgagaaggaggtgggaaaaaaaaatgctgcgccacgccgtccggcgtgtatgctaccgcaccgctgcggcggaccctgaccgacaggcagctcacacggcgga

SEQ ID NO: 458664 - DNA, 348 bp, Sorghum bicolor
cgtccgcctactccctccccccacccctacccctagcctagccccctccccgcccgtcaaagcgagagcgccgtatcaccggcctttccctccaccgccgcctcgatccgcgcccaaagatacctttcccccccttcctcgcgccgccgccgccgccgccgccagccgttttgctgcgaccatggcggcggagggggagggaaagaacccggcgggcggtggcggaggggataacccccagcaccagcaggcagtgcaggctgccccggcgccggcggcacagggggaagcggcgcatgaggctggaggacaggggacgggactggagccggagggggagaaagcgga

SEQ ID NO: 458665 - DNA, 218 bp, Sorghum bicolor
cgtccgctgaaggaagcggatatgcttcagacctctggtatacgtagcgttgcagatctatctcagagagagacactgcattctacgagcggacatttattatgggctgttcgacattctacttaagctgctgcttatatatacaaagctatcagggtgtaatcctgccatagaaagcatgcaagttaatatggggataataaaagtagtatcaatga

SEQ ID NO: 458666 - DNA, 335 bp, Sorghum bicolor
cgtccggaaattgcagcagaattcacttatgcaaccgcatattcagcagcagcaaactttgttgcagtcaacacagatgcaatcttcacagcagtccatgatgcaaatgtcatctggccttcagcctgggcagaccaccattccacaaactcagtccatggcgatgcagtcagctacacagagcggtattcagataaaccactctccaacttatcttcgctcactagtgcggggcaagcacataagcaaacattccttgcacctcagacacaatctatagccgttaacacaccaggtatatcagcgtcacccttgcttgcagaatttacaagtgc

SEQ ID NO: 458667 - DNA, 287 bp, Sorghum bicolor
cgtccgctcacgccggcacgccgccgccggagcgccatgatccaccttcggaagcgcatcgtctccctcctcccccggacaccaacccgcgtgccttgcccccacaactccccgctcttctatccccaccgccttctctccgccaccaaatgcgtcgctacaactacaaaccagttcgccgtcgaggactacctcgtcgccacctgcggcctcacccgagcacaggcgctcaaggcgtcgttgagaatctcccatctgaaggacgcctcgaggcccgacgcggtcgt

SEQ ID NO: 458668 - DNA, 374 bp, Sorghum bicolor
  unsure (1)..(374): unsure at all n locations
cgtccgcatttctccctcctcttcttccatcttgccggcctgtctccgccgcgctcacacagctcacaaaccaacgagaaatcgaagtcgacctcagccgcgggctgcggctgcgtgcgagcactctattggagcagtggcgccgtgccgtcaatggcgggcctcgggttcgaggagaccgagctccggctcggcctgcccggcggcaacgacgccggggatgccgcggcggcgaggaagcggggtttcgaggagaccatcgacctcaagctgaagctggagcagccggcggcgccgcacttggagaagggaggagaggtgncgctggcgacgccgtcgcccccgggcgggtcccactgtcgtcgcctccagca

SEQ ID NO: 458669 - DNA, 453 bp, Sorghum bicolor
cgtccgcccacgcgtccgagcaaaccctccgccgcccgccgcccgcccgcccgcccgcccgagaggaggaagagaaggcgaaggagggcagcaccgggcaacatgaagacgatcctggcgtctgaacgatgacatccggaggcgtgacgggacgtggccgcaactgtaacgtgagtcctcttgatgtatctctattaagtacttacattactttatttaaaaggttgtctatatagtgttctattttttcttatttttttatttttctcttatttttttttttattttattatttatattattttttttattttttatttgttttagttatttttaaaaaatttattaatgttttttttatatatattttttttttattttttttttatattttttatatttttttttttatttttttatttttttagttttttatatttattttataaattt

SEQ ID NO: 458670 - DNA, 366 bp, Sorghum bicolor
cgtccgggcgactggagctaagcgtgacctcgcgttgcctttgcttgtgtcgagaggtcagaggagaagcagagcagcggggtacggtggtgcacctgcacgtagccgctccgaccatgtcggatcaccagaggatccaccctgtggacctggaggccggcagcaaccggccgacggcgccgctggtgccgggaggctcgtcgttccggtcagacaagggcgaccctgcggcaacgcggagcgccaaccaccaccaacaacaacgcgcctacgtcccgggcggcccgctgcctccgccgccgcgccgagtcgcgccagcggcgccgctacctccgccgtcgaggaagcggcgcagccgtggttgct

SEQ ID NO: 458671 - DNA, 274 bp, Sorghum bicolor
atccgggtcgaccacgcgtccgcctccacccaaaatttccccaaggccgcgcctgccaccccgccgccgccgccttcgatttggacccgccggagcgccgccgcgcagcgccgtgggcgacgaatcccctccacgtggcctcgaccccgcctccccctgactacccgcgccggcgccacgcgttgccccgccgcggcctgccggcggccggaccggcgctgtcccgacagctccccccgggcgcccaggcctgtccggtcgcgcctgtttaccg

SEQ ID NO: 458672 - DNA, 269 bp, Sorghum bicolor
cgtccgatcatggccttccattccccgatctagggttgcgagctccccgccaccgccggccatgcccgacacggacgtcgacaccgagatgcgcgaagccgccgctgccgcggccggggccccagccggcgacgacgacggcgagggagacaccgaggaggaagaggaggaggacgaggacgacgaggatgaggtcgatgaggacgatgaggaggagttgcccgccgcggcgccggcgccgaccgaagagcaacccgccccagcgccca

SEQ ID NO: 458673 - DNA, 421 bp, Sorghum bicolor
cgtccggggaggtgatgtgggctgatcaggcagcaaaccgtgctgagattgcaaaatcttcctggcggaaattgcagttgggagcacctccagcagatgacctgttactgtatgcaattgctgctagtgtgttgcagaagcggaaactgataatagaaagctacagcagcatggatgagatcataagggagtgtaacagcatggctggacagctggacatttggaagctcctggacgacgcgcacgatctagtggtgacccttcacgataggattgagtagctgtggtctttgttgcttgtgctatctgtcaagttaccatactatcattatacccaatctctttgtatgttaagtatgtaccgacagtgaatagaagcacgttgatggagttaggtaggtagcaatgcccgcaatttttt

SEQ ID NO: 458674 - DNA, 412 bp, Sorghum bicolor
  unsure (1)..(412): unsure at all n locations
cgtccggcctaatccatccggcacaggtgacaggcacacacggtacaggcctcacgtacactgcgctcctgctcgttgatttccagcccacacaacaattatttacaagctactagacagtcaaatttacaagctactagcagcagtagtaaacatgccacatgcacatgatgctgtcgtcgagactcgacactagctgcatgcatcgttagttaacaatggccggaagaaggtcatcagtacatacacgtacgtcactgatcgagcagcggctgtttctgtttgtgtttattgccgcagcacgcggtggggtacgtgaccggcgggcagttctacggcgccaaggcgagccttgaacggtggncggcgcaggtggcgtcgcggcgagtcagctggcgagatctgggtattc

SEQ ID NO: 458675 - DNA, 186 bp, Sorghum bicolor
cgtccggggggtacggcctactgctgaggcagagagaccaggatcttctggtagtggaagcacatctttctggaatcaaatatttacttccactgaggacaaaacacatgctcctgcaagagataacacagcaaacaaatcttatgctgggcctgcacccaatctggaacattcactctccacgat

SEQ ID NO: 458676 - DNA, 391 bp, Sorghum bicolor
  unsure (1)..(391): unsure at all n locations
cgtccgactcgctctagctagctagctagcgcggcgagcggtgcagtgcanggcgagccgagctgctgcagaggcccggagaccggaggagggagggagagacgtcgcctgcctgcgatgtcaccggcagcatccgccgccgaaatcaccatcgtcgtcgttgcaagcgtcccgagcgagcagagcagccaccgcgccgcggcagcggcgccgtccgtcccgtcgtcctacgccgtctgggagaaggagcggtaagactgagaggtcgatcgagctctacgtcgtctgcactgaaagtgaaagcctggaacctgctgccgcaagggagagtgaaggaaaacgcaaggcaaggcccatggaggttgagaaagccaagtgcgagtgcttcggg

SEQ ID NO: 458677 - DNA, 418 bp, Sorghum bicolor
cgtccgcggacgcgtgggccgagggttttaagtctggcgtcatagatgagagccattgccactacatggtcgttttccaatatgggtccattgtgctgttcaatgtttctgatcatgaagcagatggatacttgaaaattgttgagaagcatgcatcgggtttacttccagagatgagaaaggacgattatgctgttgttgagaagcccaccttagagacatggatgcaaggtggtcttgactatattgtgcttagggatctgagtattgatgggatccgtacaattggaagtgtcctgggtcagagtattgctcttgactactatatccgtcaagtggatggaatggtagctgagttcacagatatcaatcgtggaatggaaaaaaccggtaccttcactatggagaggaagagctt

SEQ ID NO: 458678 - DNA, 253 bp, Sorghum bicolor
gcgtccgcccacgcgtccgaaaaaaaaaaaaaaaaaaaaaaaaaaaaaaaaaaataaaaaaaaatcaaatataaaaaaaataaaaaatgggcagggggtgtggaagatccatgcttacttacacgtgcttacaaaaattatattttttttattgtttaaacctaaatttaattgcctggccgactcttaacaaccttggttacttttaaaacccttgccattcccaactttatcgcctattaaaacattccca

SEQ ID NO: 458679 - DNA, 274 bp, Sorghum bicolor
cgtccgtagatctagacatttcccccctcccttcctctctccccaatctccccttgtcctgcgctggcaccaacctggcccttactcctatggcggctacctactcgccgagctcgccacctaggcgcagcgcaaattccccgaccccgatgatggtgtcctcttactgtggcgctccgacgaacaacccacaccccggtgggccaggaaggaggttgatctcccccgtgaggtgtgctgggcgcccgacaagcacgtattctacagcgacacc

SEQ ID NO: 458680 - DNA, 369 bp, Sorghum bicolor
cgtccgaattaacttgcctatagtgctttcggaatataaagatgaaaacatgttaaatgcaaatgtgaaagtaagcaaagttctccaggcttaatggatgtagatttatggatattggtgacctgcagaattggatcatgaactcaattgcatttgcgaggtacataaaaggataaatgcctattgaatttgtagtcccatttaggatttatcttttgcttgacttgtacagaaattttcatatttagctcagttttattttgtacactgacatgcttggatacctcagatgacagtcatgcattgatcactgaatgcacaggccttgtttactttgaaaagcttcacaattagttgtctattggatta

SEQ ID NO: 458681 - DNA, 209 bp, Sorghum bicolor
cacgcgtatcgccgtggccttcgctcgacatggccatggcgacctccaccttctccccgcgccccgccaccctcaacaagcccctgcgacctggcgccaagcccgccagcctcctacccttccgtgccgcggccggagactcgttgcgccacgtgcgggagcccgccgcaggtcacagcgacaggcgagcgcccgcgggctcacgggcg

SEQ ID NO: 458682 - DNA, 349 bp, Sorghum bicolor
  unsure (1)..(349): unsure at all n locations
cgtacgcgtacgccgtggcgtaccacgaactccgcctgctccgctccgcccctcccgccctgcctcccgcgccgtctcgccccgcctccctccgtcgttcctggccgccgggcttcttctccgtcgccggctacgcgcgcggngagggaggaggagccgcagcgcgtggatccagaagcttcggcgtccggtgagatctacttttttcagcccctccatttcccgcagctctctctctcgcgcgttttgcggagattcatcggtagcgacggcggggcagtcccaggctcggcgggggcgtcagcggatgcctctcccccctctcgccaaggctgctaagctagtcact

SEQ ID NO: 458683 - DNA, 325 bp, Sorghum bicolor
cgtccgggcagagatctaaagtgtacaataaatctatgcctggacacaatatggacacaagggccacaaaaaaactgagaacagagacaactggcaggacttcggttccactgtccaaatatcatgcaaacagcagcaattgttctgaagctaatttatcaggccacaacaacaaaggaaaaggaattagcattgatatcttggatagtgatcagattggagaagctgacttgaggggggtgatcttagtactgctggaactgtgaaacaaaaacagtctgatataacacaagaaggtgggacaacaccacccacagtaatacca

SEQ ID NO: 458684 - DNA, 348 bp, Sorghum bicolor
cgtccggtaattccttagggtccagcccagacctctcgaagcacatgtcttgagggtcttctgaaaatttatttaggaagtgtataattgatcaaaaagacttggtccaatcctacttttcaaatcactatggtcaccctttcctacagttgtactagcatagaatgtcagtcatgataccaggctcaaagaaggaaaggaatctcagcatgcgctttcaatcaggccagaaatcttctggtaaattttgtttgttttcaaaagtccaatctgccagcccaccaccagggaatacgctggtttatctgaatgtgtatgatttgacaccagtaaacggctatgtttact

SEQ ID NO: 458685 - DNA, 292 bp, Sorghum bicolor
cgtccgactccacctccaccctcggcggcctcacccgccgcgcccgtggcgctctcgctgccgggcttcgtcgccgaccgcgccgaggccgcggtgcgcgtggagcgcctcctgcggtaccagttctgcgaccgcgcccttctcgaggaggcgctaacccaccaatccttctcggatggcgcgttctcttaccagcggctcgagttcgtcggggatgccgctcttggcctagccttctccaacttcctctacctcaccaaccccacccttgggcccggggcgctcttcacgc

SEQ ID NO: 458686 - DNA, 163 bp, Sorghum bicolor
cgtccgctttgttcttggagtccaactattttgatcctgttgggaagggcaaggtccgtttgtggcattaatttgcatggcaggagcttggtgtatcgtaaaattgcaacagaaacatcagagagagtcagaactctctgttgctgaccctgtttggtgattc

SEQ ID NO: 458687 - DNA, 311 bp, Sorghum bicolor
cgtccggaacatctcaggattgtcgacccggtgctgcaaatgctgctggacggttaccctgatccggtcacaagtgtcatcgacagcgatttccactgccagaattcaatgttgccagaaggagagctaggcatggataagaaatcactctcttcaccgataacaaaacaagcaccggaggtgtatacaaaaagggatgcacctggagatggagaagacaacttcgtccaagaatctggagatttttcagtgtcactactgatgctggcaaccaacacggcaatgagagaaaatgtgagcgtaatgggatg

SEQ ID NO: 458688 - DNA, 275 bp, Sorghum bicolor
  unsure (1)..(275): unsure at all n locations
cgtccggttttttaaccctgcaaacacctgatgaatacctgttacaataggttgcggccatgagttttgcaccaaatgtgcactctacttgtgctccaccactagcagctcaacatccatccgcggagttcctggctccatatcctgccctttgtgtcggcatgccattgtctccttcatgaggctcaccagtactaccccaataaaggagcttncatggacaagtgcatcgctagctctatgtgcagcangcgcaagcactggtnctgatcatg

SEQ ID NO: 458689 - DNA, 91 bp, Sorghum bicolor
catccactcatgcggccaatgacatgccaaagacgacagagattaggagcaggagcttgatggataatgcttgtgctagtgatactatcac

SEQ ID NO: 458690 - DNA, 73 bp, Sorghum bicolor
cacgcgtccgcacccacgaaccgcaacccgcaccgttccctttccccacctcgatctcgcgcgctagggtttc

SEQ ID NO: 458691 - DNA, 361 bp, Sorghum bicolor
  unsure (1)..(361): unsure at all n locations
cgtccggcctttccataggtgtacatggactttccattcttagggtctttttttccttttgttttcaggaagataaatgattctttgttaatctaattcaccactgagctaagatggctatagaatgagggaatttgtttggataatctatgtcaaagagagggtttatgagcttcaccattttgttaacttaaacaatttaattaattcgccaggcaaagtggcgcttttcattatcttttttgcgtaacatttctgcttgtctattttctctacaggcaattacttctatgcattggttcttcatgtatgatctatcctacttcttaaactttaacaagattatatttnttctctcaca

SEQ ID NO: 458692 - DNA, 238 bp, Sorghum bicolor
cgtccgctattatcaagggataaggagtcaattgtattctacagagggaaagatttcctccccccggctgtctctctggcaatagaaaaacgcagaaagctgggcagttctacaatctacaagccgaagcctgacattgaagaaaacatgcctactcaagagactctgtactgaggtatcaatgatgtctcatacacatctgagaggactctgcacaagtagacaaacttatctgtgc

SEQ ID NO: 458693 - DNA, 172 bp, Sorghum bicolor
cctgtctaacgccaccggtcgtggggccatctgtgaatggcgtgggatctatcgaaggctgcgatccagaacggccacaaggaggattacatattactgtgttcacccacatgggtgtatgatggtgccccgggtactttcggccacgcggcagcgtgcacactactgcagt

SEQ ID NO: 458694 - DNA, 300 bp, Sorghum bicolor
cgtccgcaaatcctccacactgttcgatccacccaaccctccccaaaacccccgaccaaggagagtagagcgcgagaagatgttcggcttcgggcaccacggtcaccaccacggcgagaacccgccggcgcacccttctgcccacggcggcgtgcacccgcccaccttaagatctttgcaggccgagaggggactgctaccgtcgcacgaactgggtggccctcaaccgcacagacagatgtcagcatcctacaccatagcagagaccggtgcttacagcatgtgctagatctgcgcacg

SEQ ID NO: 458695 - DNA, 191 bp, Sorghum bicolor
  unsure (1)..(191): unsure at all n locations
cgtccgtgataatgaagcagccgaaggcttacagtctgcgctggatcacatggaattgcctgaaacaatcaggcggaggatccaagcagccatgcctcttcttccaccatcccggcacccttctatgcaatgtcaacctnctcagttgtcgttggctgcattaacaccactccagagcagtacatctgtgc

SEQ ID NO: 458696 - DNA, 466 bp, Sorghum bicolor
  unsure (1)..(466): unsure at all n locations
cggacgcgtggggtagtagtacactcgccaagggcagaggcggccggacgaggggcggcggtggcgcggcagagccgagcggagcggagcggttcttctccacgcctgacgtctccctcttccccgctctccgcagcctcggcggtcggtgctcctcccttctcccgttcaggagccttgtttacttcctgtcatgggtatggaacatttcatgagttctgcanacccttcagcaggttttgcattgtatggaaatgaagcaacagaggaaatgaaaaggttacaaggtctaagagcagaaacactgatggaaacctaccaaagcaccagaaagcagagatgtagcgatcaggtgtccaataccatgcaaaagcagcaggcggtatagggaacatgactngagagctgcacaagatctttctgaattcattctgaggcaagctttacctncatactttatgggatc

SEQ ID NO: 458697 - DNA, 326 bp, Sorghum bicolor
  unsure (1)..(326): unsure at all n locations
cgtccgcccaattccgctctctccctctctccctcttcccccaccgcagcagcaggcgagcgcgaggcggaggccgaggcggaagaggagagatggagtcggaccagggcaagctcttcatcggcggcatctcctgggaaacgacggaggagaagctgagcgagcacttctccgcctacgacgaggtccgcaccatcttcatcacggggctccctgccgacctcaaggaaagggagctgcacaacctggtgcgctggctcccgggattcgaggcctnccagatcaacttcaagggcgaccagcccatgggctttgagctctttttt

SEQ ID NO: 458698 - DNA, 330 bp, Sorghum bicolor
cgtccgggacaatcatttgttccttatggccctccaaatggggtgcataagcctggcgtgcacccagcaggctatgctgtacctcggatgccggttcctccatttcctggggctccacattctcaaccatatacgattccgacccggggtttgcatgggcccattggagctgttccaccggtgcatcaacctggaagtagaaactttggggcgcctcgttcaaatactggtgggcctattggtggccaccttgctcatcaacagaactcccagcaagctatggggggcatcgggtcaaacttaactacactggcatggagaatccgagta

SEQ ID NO: 458699 - DNA, 109 bp, Sorghum bicolor
cgtccgatcctctcgccgttccgccgcgattcacccccgccacgcccgccgccgtcgacgcaaagccgcgcgcgaggcctctccccttcgccagcagcgatgaagctcg

SEQ ID NO: 458700 - DNA, 400 bp, Sorghum bicolor
  unsure (1)..(400): unsure at all n locations
cgtccgcccacgcgtccgcccacgcgtccgctgcgaaatgtcaagcctcgaggagctcattttcggtaattgcaccaatctcagagagttaccgctttccatggctcaactgtcaaatctattagttcttcatgtcgaggggactcagattacagcttttccagatcacatgttccaaaacatgcanagcctgcatacactgaagctaatcaataacatggtattgatatcactaccgatgtccctgtctgaagccaaacagcctgaagtgctacatcttagtaactncattagcctaaggcactccatcatactgtcaaagcaaatgcctaagagctcattctctactgataggtacactcaatcttggacatacantctgaactattcaactgagatg

SEQ ID NO: 458701 - DNA, 252 bp, Sorghum bicolor
cgtccgcccttgtcgtcgtactcccctccgcctcctctgccaccccgtgtgctattcctcctagcacccaccacccaactcccccctgtattgtgtccctctcagtcagtaggaggagcaagtactacgaggctacaagtagtatgccttggtaccgacgaatcccagcttccgcggtcgtccgtgcgtcctagtagaggctaaactggcgaggagggtggcggcagctgcattgccggcaggggagattcc

SEQ ID NO: 458702 - DNA, 344 bp, Sorghum bicolor
cgtccgcgcagatattgatgagatgcctctggtaccggctaattcaaaaacagaggctaacaaacctagcctgactcctgaggaaatgaagattaaagcacaggagctaagggagcgtgcacgtaagaagaaagaggaagaagaaagaagaatggaaagagaaagggagaaggaaagaatacgaatcggaaaagaacttcttgaagccaaaagaattgaggaacaaaatgaaaggaaacgcatgatagaactgcgaagacttgagaaagaggaggagaaaagagctagagaaaaaatccgccagaaattagaagaagataaggctgaaaggagaaggaaactag

SEQ ID NO: 458703 - DNA, 95 bp, Sorghum bicolor
tcgcgtcgtgccaccgcgacgcgtcgggtctggcactacaacggatactgccgtgagctttaccgatgaggaggccgatgacttactacatactg

SEQ ID NO: 458704 - DNA, 370 bp, Sorghum bicolor
cgtccgcctgtcgctgtcatcctcggcttctcctagaagctcgatgcgatggcgacgctgctgcggctgcccgtgatgcacggtcgcgtcgtgggtggcggcgggaacaaagacaagctggcgcagcggccgtggtgggacgggaacaagcccgactcaccgcgtcagccgtggcagtcgggcgggaacgaggcgcgggcgacgggtggcgaaccaggtgcttggcgtgctccgccgcgactgcgagttcctccaggccggcaggccaccaccggcgccccgcgacgtcttctggctccgtttcatcgagaagcagcggcggaagcagcagcagcaaatacgtagaagaggactaacactatgggaaact

SEQ ID NO: 458705 - DNA, 395 bp, Sorghum bicolor
cgtccgatgaaatgcagcttcataaaaatcaacttgcctcccccttcatttctgaaggaaaatgtttttggtgaacttgatattttcttgaaggagaatgcaggattttttttgaatgactggtttccttggctatgcattttatcccaaaactaaatgaacattaataaagtttgtaacatcagtgactgttataattctttcacttctggttttttgatgctttaatcagtttggattgccatgtcaacctgccaactatcttgttttatgaaacagcttgacaattaccttttccttcattactcacgtatgtagcaatgtaggttgacaactgaattgttcaagacatttgcaccttgtttcatgactgtcacaggtcacatcactacata

SEQ ID NO: 458706 - DNA, 353 bp, Sorghum bicolor
attccggatcgaccacgcgtccgcgcacgcgttcggtttgactatcatctacacaggcagaatacttctatgcattggtgcttcatgtatgatttatcctactgcggaaactgtaacagattatatattttctatcacatgtgacataagtagtgttattagcaagctttgattgatattagcagagcagggagggcgacggtgaaagcagggagcatcttgcaagcagcagcatgagtgaggtgccctgctagcgcgacaggtaacaaataatggcgctgtgaagatcagtttcaagtgtttataatgccccttagaaagttacatcggctatcaatgtggtcaccctcaat

SEQ ID NO: 458707 - DNA, 269 bp, Sorghum bicolor
cgtccggcggacgcgagaggagaagactagaccaggggaacgtcgaagaggcctcggatcggatccatcgacgcgtgaagatgtcttcgcccgccgagtactacaaatcacttccacctataagcaaggcatatgggacattgtgtttccttaccaccgtgctagttcggcttcatatcatggatgggggttttcttgtattatattaccctcgggtgtttaagaagtttcaggtatggaggctatttacaagtttcatctttctggga

SEQ ID NO: 458708 - DNA, 384 bp, Sorghum bicolor
  unsure (1)..(384): unsure at all n locations
cgtccggctgttctcccgtgaccttgtctctgccaaggaccaacaccagcgaaaaggaagctatgggcgctgccgcggcggaggtcgtggcgccaccgaggccgacgtcggccaaaaggaggtcgaccacgctcaagttcctgttcgagctcgagaagccggacggcgtggtccccggcacgggcaagctggcaccgccgtcgccggagcccgaggcggacagcctcatcgacaagatcgcctcgtgcaaccgcgtgttcacgttcgccgacgacgcggncgacaagtgcgaggaggagcgggacgcgaagcgggagcggctcgttgaggtgctgggcgccgtccggtccagcgggagcgcgggcaacaaggagcagcagccgc

SEQ ID NO: 458709 - DNA, 277 bp, Sorghum bicolor
cgtgcgcggacgcgtgggcggacgcgtgggggttctggtcctgctggaaaccaatgataactgtactcgcatgctggcgttatgtcgtcctgcgcgcgctcctctcggggctcatctactagcagtcgctgttgcgttgtgtgtttaggggtgcatggcagcacagcaccaggccatgccccctgatgtgtgcgcacattgatcgggtgcgactttgtttgcgctatgttaccatacatctattacctataatatgcgcacgtctttgtgtactcgc

SEQ ID NO: 458710 - DNA, 122 bp, Sorghum bicolor
acgcgtccggtcgctgtggcgcactccgagtggtcgcagcacgcccacgttgtgtatacattaacctgggatatcatcatacgattccggtactaggggctctatcattctggtcgccgtca

SEQ ID NO: 458711 - DNA, 271 bp, Sorghum bicolor
cgcgtccggttcaatttttttggtgcttgtgtagcactagcttggattattcctagtgctgtaaacaaaatcctgtggtcaaatttacaacagagtggaaactggacagctcttgcgttaatgtggaagacaaccccaattaccatatttttctttgttgttttgatgccactgttggatcctccaggccttttatctttcaattgggacttgaagaacagcagcgcaattatcacatctgctttgttcggtttccttcttcagtggtctg

SEQ ID NO: 458712 - DNA, 245 bp, Sorghum bicolor
cgtccgctaccacccgccgcgggaaggagacgaagcagaggcttgtcgcagggtttccgtttagcggcttctgtggcggagcgccatgaacagcagcaagcaggcgctgatttacagcttcgtggccaagggctccgtcgtgctggcggagcacacggctttctccggcaacttcagaccgtgccgtgcagtgccttcaagcttccccacagaccagatcactctctggacgcacccttacttct

SEQ ID NO: 458713 - DNA, 342 bp, Sorghum bicolor
cgtccggcgagaagtgagaaaactcaaatgaccatgcagcacaaagagtctgcgagtgaatggcaaattgatgtgaaaagaatgctactaatcacatccatcaaatcatgtatcacaatcccaagatctataaaacatttagctacatctgccctgcaggccaaattctaatgcgcagcatatagatatataaacggtttatgtgaaaaatacttctaagcactactagcatcttatgctttctttttaatgcttgtacattccgcttgaactactaaagtatagtacttcacctctatttttgcaaaaaaggctgtatccatggttataacaaaaagaaag

SEQ ID NO: 458714 - DNA, 117 bp, Sorghum bicolor
cactccacgcgtagcgagctggacaggtgcgctggcgatataccagcgatccggtggcggcggcggccgacgacgaggacgaggaggaggaggagcgctacgtgctcgtcggcatgc

SEQ ID NO: 458715 - DNA, 256 bp, Sorghum bicolor
cgtccgattggagtgagatcaaacgcccatcttgactggtggcgaccattaagtcccgacttctctcactatgttttcacttaaccctagccattacactggctacaagtgtttctgggcttgttcataataaggtgattgatctaaagctacaacccaaaccaataccgcaaccttgaccaaagactgtgccacaaccagacccaaaggccgaaccccagccaacaccgcagactgacccaaaaaccacaccaca

SEQ ID NO: 458716 - DNA, 68 bp, Sorghum bicolor
cgtccgtacacttcttccccttcctcttctcactccgaagtccgaaccctagccactactcactttcc

SEQ ID NO: 458717 - DNA, 179 bp, Sorghum bicolor
cgtccgcggacgcgtgggtccggacgcgtgggcgtggccacacacagagggtgacagacatggctttctttgctgaggatgtccatcgtttggcaagcgcgagcgtagatgggcggatatatgtgtggaggatcgatgaaggacctgatgaagaaaataaaccacaaattactggaaag

SEQ ID NO: 458718 - DNA, 134 bp, Sorghum bicolor
  unsure (1)..(134): unsure at all n locations
cccgcgcgtctcgcctcgcgcgtcgcgcgtgcctgctctctcccgccgctcggtcgcacctncgtcgactactgcagtagaaagaactacccggtgaaggtcagcggggtggagatcgtgcccgatccggtcga

SEQ ID NO: 458719 - DNA, 79 bp, Sorghum bicolor
acgaatccgtgcgacgtggggctggatctcagtggatcgtggcagcaaggccactctgccacttacaatgccccgtcgc

SEQ ID NO: 458720 - DNA, 57 bp, Sorghum bicolor
gtgaaggtctgctagagactgatgttctgtcacccattttgtgtgactatgtagctg

SEQ ID NO: 458721 - DNA, 139 bp, Sorghum bicolor
  unsure (1)..(139): unsure at all n locations
cgtccgggtcaccaccaccacactcctctcttttcttccccagcaccaccgtacccgcagctacnaatggagggtctgaggcagtgagcgccggcatggtgaagcctgagcagcacacccacagctacgagcacctggt

SEQ ID NO: 458722 - DNA, 101 bp, Sorghum bicolor
cgtccgcgaaacacagacgcacacgcaccactcaagctgatgtgactactgccaatgtactgagacacatcatgctccaaggccgacgctgcgctgccggc

SEQ ID NO: 458723 - DNA, 425 bp, Sorghum bicolor
  unsure (1)..(425): unsure at all n locations
cgtccgctcgtcgttctcccgtgtccgccgggcgctgtctgtctctggtggcgacgactgggcggncactgccgccgncgccctacgccaggttcccagccctccatcttccgtaccttcgccggcgacgagcagccgccaggagggcctcgccaccggttgggagggaggcggagatgagccgggggcggtcgccggagccgctggatttcttcatctggactgtggaggatgtagggttatggttggaggaaataaatcttggaagctatcgacaggcttttgaagagaatggcgtcaatggagagtatctagaaagcctgtcgatgttcactactgaacagattcttcgatttataagacggtgtcatatgaaatggggagatttatcaccctctgtaaagagtngagacgcatcaaagttg

SEQ ID NO: 458724 - DNA, 66 bp, Sorghum bicolor
cgtccgcaccgcgccgaacgccatggccgaccccgcggagcaccgtccagcggaggaggaggagga

SEQ ID NO: 458725 - DNA, 160 bp, Sorghum bicolor
gatcgtgccacgcgtcgggaggagcgcacttctatgatacgcccatgatgcttatgccaaccctatggagggtgtggagcatatggatgcaaggtctggttggtaggatctgaaggctacgacagctttatggatgtgtatggcagaatgaggtgtgctg

SEQ ID NO: 458726 - DNA, 252 bp, Sorghum bicolor
cgtccgcccacgcgtccgtgaaaatgacattcaccttttcttccactgcgatttactaaacaagtatggtccactgccactcctccaatgcctactaacattattgttgcagatgaagatggagttcaacaagctctacctctccttattactaacaacccatcagacactactttgcgtaaaacgctttttactctttggtacatttggaaagcctgcaatgataaccgctttcaaagaaaaacatggact

SEQ ID NO: 458727 - DNA, 367 bp, Sorghum bicolor
gcagaatcaacgagttcttctcactgatgtcaatagagctaagtacagtttccagctacagaaatactaatttgcagtaccattaaataattctaacagcaactcataaacaacaccaatctgtccaaaattcagtaccaccatgcttgttcgcttgagtttgtcagccaaatttgctagccattcagcaacttttttttttcataacaaatcagccaatactttctgtttttcataacaaatcagctgaacctgatcacatctccagaccagttttattcagcagatgaaccttgatgaactcatgcacttcagccaaccagcctccatatcagaattcacagcctgaggttcaagtcgatcttac

SEQ ID NO: 458728 - DNA, 323 bp, Sorghum bicolor
  unsure (1)..(323): unsure at all n locations
cgtccgcccacgcgtccggcaacctccaagtcctatttggaaggtggatgttcagactctnttgagctaggtaactccagcagggaagatgagaatgagcaagagtcgtcttcttctagttattcagaagaaaacccaattgagaatgatccattttttcccgagctgggcctccctttcttgccagttgctgatggagatgaatntgngaaatttttaatcaagaaactaacgtctcaaggttatcctttgccagctgtccttgatggaggcatgcgtttggtaatacttttgaaatgaattcctgatgtatctggagtaac

SEQ ID NO: 458729 - DNA, 99 bp, Sorghum bicolor
ctctgcgaccagctgctcttcggatactcaagttgggcaaatcaccgcgtgcgctcttcagagccagaatttcatgacacatgatgatgatgatgatga

SEQ ID NO: 458730 - DNA, 56 bp, Sorghum bicolor
cgtccgcccacgcgtacggatcgttagattattggcgagctacattccattccatc

SEQ ID NO: 458731 - DNA, 124 bp, Sorghum bicolor
  unsure (1)..(124): unsure at all n locations
ttcccggtcgccacgcgtccggtcgagcagtggtgacataggaggccaccagctaaagtcacatccgagacctnctgcctggagatccatgatgtcaatgacgtatttcttggtcgcaacacat

SEQ ID NO: 458732 - DNA, 176 bp, Sorghum bicolor
  unsure (1)..(176): unsure at all n locations
cgtccgcaagatctggctctccgccggcctctctgctttccttttcctctacacctccatcttgggatgcaggcctggcaaggcagaggtgacctcngacctgcccatggtgcaggctcggctcgtcgctgcattctgggtcatgtcagggcgctatgacgtgtgccagcaggtga

SEQ ID NO: 458733 - DNA, 177 bp, Sorghum bicolor
cgtccggcggcggcgcgtgcgagacccatccgccgccacgccatggccaagttcaacgtggtgcagaagaacaggcgccagtggaagcatgaccgcaagcgcgcctcgcatgtgagcccggaccgcaagctaagcaggaccggcccgttcatgtcgaagcgagccagctggcgcgct

SEQ ID NO: 458734 - DNA, 178 bp, Sorghum bicolor
  unsure (1)..(178): unsure at all n locations
accgtccgaatcccggtcgacccaccgtcggcaagagcaccagccgtttaggatcagcacgcctgacccaaaatttttttcttccccgctgatgccaatttcacttatcaggggcccgaatattcctcaccttttggngcattctttgtcccattctcctacaaaccttatcgcccga

SEQ ID NO: 458735 - DNA, 101 bp, Sorghum bicolor
cgtccgaagttacaagagtgataggcatattcactattatactttctttattaccgggtacctggaaaggaatttcaaaaaatttatttttcgataaaccc

SEQ ID NO: 458736 - DNA, 90 bp, Sorghum bicolor
cgtccgcaagcattggtttgtcttcattgtggatttgaagaacaaacagtatgtgtttttggactcttatttttctggtgatcacaattt

SEQ ID NO: 458737 - DNA, 273 bp, Sorghum bicolor
  unsure (1)..(273): unsure at all n locations
tgtgtagagatgtgtggagtcactttcgtgcctaagcatgcatcaaatcactgaatgtagcaagtgactaatatagaggcctgactccactaatgatgctaaacctgtgaatgcaggtgcatgaagtctttacatactcagttgtcatgtgtctgacagcagactgtggtgtgatatgcccacagtgtagagtgtgacatcgnatggcaactctgctaatgtggcggttagacgagcgcctgtacgtgcacttgttgtcgtatgtagtttgca

SEQ ID NO: 458738 - DNA, 57 bp, Sorghum bicolor
cgtccggaagaagaagtgaacgtagtgacgcacgagtggttgctgatcatcatgcag

SEQ ID NO: 458739 - DNA, 140 bp, Sorghum bicolor
cgtccgcattgattgctaagcaccaagctgagggctttggcttaacacatacattacattgtactacttatttggcaaaaaattcagaaatggctagccaaccatacccacatggaaattattaatttgtgacacccggg

SEQ ID NO: 458740 - DNA, 100 bp, Sorghum bicolor
cgtccgcaaatccaatcagatccgatttcgtcgagatgaagccggcagtggaggtggaggctgacgagcgagcggcggaaattaagaagcagcggcggcc

SEQ ID NO: 458741 - DNA, 99 bp, Sorghum bicolor
cgtccgcgcagagacaggcgtcttcgtactcgcctatctccgcgactcaaaagctttttccaattccccaccgccgccgccgttccacctttccgacga

SEQ ID NO: 458742 - DNA, 417 bp, Sorghum bicolor
  unsure (1)..(417): unsure at all n locations
cgtccggcccccaccgcgcctctccatcactcccccgacgccatgactctgtagcggcacgcagcaccgcaaagccagccaccatgggcaggacgagaggcagcaagagcgccggcggcgtgaggtcgttcccgtcgccggcgtcgtcgtcctcggcgtcgtcgtcggagttcgagttcacggtcacgctgtcgccggcgtccaagcagcggtcggcggagcagctgtgcccggcggacgagctcttctacaagggccagctcctgccgctgcagctgtcgccgcgcatctccatggtgcgcacgctgctgctgtcgtcggcgtccacgttctccgcctccgcgtccgactccacctccacgtncaactcctcccgcgactccaacggcagcacgtcgtcgtccttctccgcggact

SEQ ID NO: 458743 - DNA, 75 bp, Sorghum bicolor
  unsure (1)..(75): unsure at all n locations
cgtccgcatccgccttctagaaccttctcgccggcgncgncggcgtcaccacccgtcgaagcgaagcaaagcaat

SEQ ID NO: 458744 - DNA, 81 bp, Sorghum bicolor
ccgaaccattttttaatcctgagcaattctggcaagccaatatattccaggtatggggatgagcacaagctagccggattt

SEQ ID NO: 458745 - DNA, 301 bp, Sorghum bicolor
  unsure (1)..(301): unsure at all n locations
gcgtccggacacttcgaacccgccgcagcccgcagcaagatttcgtcgcgccggcgctcacagtctcgtactcctcgcctacaatggcgtctccctccagctcctgcgaggtcgtggacctcgccttgcagcaagctgcgacgatgcatcctcaaagctcttcttcagcagagacggcggcggcgacttgtcttggccggcggcggcggngatctcgtccgcgctgaccgaccaaaaatcgctggttgccctgtgcggcanaatacggngtgccccagggaagttgaagcccgtgtgcgcc

SEQ ID NO: 458746 - DNA, 501 bp, Sorghum bicolor
  unsure (1)..(501): unsure at all n locations
cgtccggtcaggtcaggtcagcctccctctcgcagatccccacccgctccgccgccggccaccgcgtcgctcccctcggcagccaggatgacagaagcaccatttctgccacgtgagaggctcttcaagcagcaacattacttccagcacttgaccaagcacacctacctgaaagggcgctatgatgtgatcacctctgttgccatcccccttgcacttgctgcctccagcatgttcatgattgggcgtggagtttacaacatgtctcatgggattgggaaaaaagagtgatcttcccctggttaactagtgtttctgcctggcatggaagtcataccatccagattatgaagtcttctttgcttgcaaaataatgctgtcaaagaacaattcgactacattttcacaatcaatttctgtttgtatttgttgatatgaaatgccagcaacntcgaagatcagcattgtcactggtttnggtaattactccatccctttcgc

SEQ ID NO: 458747 - DNA, 186 bp, Sorghum bicolor
cgtccgctggattcaaaacgtttttataagaatctagaactctaccaaacgcacactagtcagtactaatggtgtatatggtttatctactaaacctttgtgatgagctatggtctatttggtggtgtatcgggggtaatggatgggttggaaagtgagaatgctatcttctatttttactgggtc

SEQ ID NO: 458748 - DNA, 403 bp, Sorghum bicolor
cgtccggcagtgaagagggtatttcttcaattgatcctctgactagtatgccagacccgcaagttggtttgacagtggggccagagctggtactggtaagtcaggaaaaaaaaggcgaagaggatatttgtttcattgacgctccaacttgcacgccagaccctcaagttggtttaacaatggacattcatgagcaaccaaatgtcagtgctggtgcagatcagtgcaacgagaattgcacttcgaatataacacctaacacagcttcaggatcgaaatacaagttctcaggaaaatgctatgagcgggttaaaaagggtgctcgcccaaggaatgtctggcttagagtttcgacccaaataataaccagggtggatccactagagctttggatgaaggatgc

SEQ ID NO: 458749 - DNA, 151 bp, Sorghum bicolor
cgtccgcacctggtagtcacactcctcaagagtggcccctgatgcatatgttgcattctcttatgacgttacttttgagtccagtgatatcatatgcgcatcttgatgagatgtataccttcttatcagtgatagtcaaatcactgctctc

SEQ ID NO: 458750 - DNA, 385 bp, Sorghum bicolor
cgtccgccctttttagtttttgcaatcactagcttgtactgttgattctacattcctgttacatagctaaaaagtggtccttactgaaaataatatgcaattgtcaacttatatgcattgatgcaaggtttgtgtagacatctttgcgacagattatgtgcttagatttctatggtcgtgctgcatcaggttccattatatatctgtttgataaaccagtttgaactatttcacatgctgtcagtacattcagttggtaaaagcttcaatgttatcgggttggatttgatttgggagttcattgtgcctatggactgtttcaaagcccttactatatctaattagggccctgttggatccaagggcttattactagctctaaaaa

SEQ ID NO: 458751 - DNA, 389 bp, Sorghum bicolor
cgtccgtccaaggttacaccaggtattttgagcccctttatgattcttcatttgagctgtacatatgtctgcttgctgctgctattttagcagccacatctcaaataatatataggtagtacgtatagttgtacatatgttgctgcaacatatagctgaatatatgatgttgctgctgctagccacatctggaatggtatattgtgcgctgtacatatagctgaaggttttctataaaatgttatatgagattgcaaatagatgtacatatgctgttattttctaagatatgttgctgatgagattgcaaatagctgtacatattttagttcaaattgcaaaatagctgcacatattttagcatatgctactatcttatgaaaaaacaa

SEQ ID NO: 458752 - DNA, 117 bp, Sorghum bicolor
cacggagacctagacgcccgcggaggccactacgctgacgctccacaacctgtgcccgtaccccgtgtggacgctggtgaccacgaacaccgtgttcccggacatctacgagaacac

SEQ ID NO: 458753 - DNA, 313 bp, Sorghum bicolor
cgtccgccgactgcgttcgacgatctcctggccgcccgcctgtctatcctcgtctctctcctctgcgatcgccgtcatgaacaatctcctgacggttgcctatgagctctctcgacgagactcctccagagatgcgggcattgatatggctatgcactaagccgatgcttcagacaacttgaaggatgtcttgacaaatgtcagtgcaattgagaggctgattgctctgctgactaatctattgactgagcttgaggctgccaatgccgaatccaaagcaggttccatagcaggttccatgcaagcgattgag

SEQ ID NO: 458754 - DNA, 252 bp, Sorghum bicolor
cgtccgcccacgcgtccgcactactccaccaggccaccgtcaccgcgcaccgctagttcgcgacgccagcgcccccagcctagctccctcactcctgccgcgctccccaccgtgccggacaagcgacgcgacgccgcgacacgcagggagagggaatggccacgcgcactgcaccgcccggggagagagagcgctgcgtgtgtgtgtttgtgctgcgtggctagcgcgatgcatcgcgatcgatcctgccgc

SEQ ID NO: 458755 - DNA, 169 bp, Sorghum bicolor
cgtacggctcgttccttgcgccgacgtcgtcgttcacgcccggccccctgccggatggccgagaagaaggccccgcgcgtgcgaagccgcagtccgcgggtgcgaaagaaaatgtcaggttgcataggaagtacacctggctgtcacgcactcaagtgtttaggccatc

SEQ ID NO: 458756 - DNA, 155 bp, Sorghum bicolor
ttcccggtcgaccacgcgtccgaggagaccacactcgttgtgtggaggatgcacacacgggaagatatggagaccactttcatgggtacaggttcatctcagacgttaaaataccgagaacgtgaagaccatatatattaactcatgcgcacgag

SEQ ID NO: 458757 - DNA, 59 bp, Sorghum bicolor
cgtccgttacttggcggagatgtcggctgcgagcaactgcgtgcgctcgtgaagcgcga

SEQ ID NO: 458758 - DNA, 349 bp, Sorghum bicolor
ctgcagcagcaatggcgacgacagacctgtggtgcgaggagaccgagctccgtctgggcctgcccggcagctgtggagaggaggtcggctaaagtaggagctctgtcatctgctcctgcaagactggctctacagagaccatatacctcaagctgatagctgtagccacgactactatcacgtcagaaagcaaaatgggcacccaacgaagcttaccaatggtctctcaaacggaacatactatgccaatggcaatggtgtgcatgcttagagcagcacgggatgatggatcaaagatttgcaactaattacttgaaaaagtcaagtttgtcttggcggtctaatgcat

SEQ ID NO: 458759 - DNA, 152 bp, Sorghum bicolor
ccctcgctgctgtgttgtctagtgtcccgccctctcgcggactgaccccgacgccggctgtggtgagccctgcaccgcgcttctggtgcgtccactgtgcgggcccgcggtctgcaccggggccgcgtacgggctgcactctactccctccc

SEQ ID NO: 458760 - DNA, 521 bp, Sorghum bicolor
  unsure (1)..(521): unsure at all n locations
cgtccgaagcgtacggccccatcgcgcgggcccgcgtcgacgcctcagcggccaccgggtacgtcaccttccggtccggtgctgccgccgtggccgccattgccgcgtccctcgaccccggtggaggcatcgtcatcggatccaagaaggttttagttgtacaggccagcgcagcaccacataactcaataagggctgctgaatccgcagggcgatcgtcgcacgatgcaacggtgaagaacgtgactgataattcagccatgctgagctccaaagcagcttctggagtgacttacaaggcgcgggaaatagtcgcttatgatgatctgttctagatttctagtgagtgtgggtagttaaagagttttccaagggacaaaccagcgttgtcaccttcgtacaacctagtaagaaactgagagctgcgcacatgaacctctgtaatcttaattaatctagccacaatgttcgtttaagaaaaaaaanngtatttnttctatacttattatatatataaaatt

SEQ ID NO: 458761 - DNA, 347 bp, Sorghum bicolor
cgtccgggactgcagtgctatgatgaccaaggaaacgaaaacttcgatacagaattttcctcatctaatctttcttcatcaggtgttctgcagcaaactgatgttagaggagctgttcgtggtagcagttctaccagtaaaatggatgcagggaagaagaatgctggttctgttcatggtgatactagaaccacatatgaagctgcaaggactcctagaagaattattgagaaagactccaggctcagacacaggcccaagataatacccaaatccatcaaaaccctttcaaaaagtgctatggactacactagtgagaggcctggttcaatgaagcccaatacaag

SEQ ID NO: 458762 - DNA, 328 bp, Sorghum bicolor
cgtgcggccgacaccttgcatacgcgagccaaacgcttctgacaggctcagtctccacactagtgtatccgcaatggcgcacggatgatccacgagtggcacagtctaccagctccaaatacagtacttactctgcggacggtataacgaggcatagctgcagcgaaacaattcagtggacgacccatagatgaaattccactgcagatcgagaaagatctaccgtcccagggacttaatgaatgacagaagcctcatccaggctgtgtgcttgcacgctacgatgatgctacgacagctagctaattaatgaggtacgaggtgctca

SEQ ID NO: 458763 - DNA, 91 bp, Sorghum bicolor
cgtccgcaacatgattgagaggtccaccaaccttgactggtacaagggcccaaccctgcttgaggctctggacttaatcaatgagccaaag

SEQ ID NO: 458764 - DNA, 91 bp, Sorghum bicolor
ggctctggcggcctactactctggctcggccgaggctatgatcatgctcgacatgacgtgagttcatggagagacatactcgacctcaaac

SEQ ID NO: 458765 - DNA, 51 bp, Sorghum bicolor
cgtccgcccacacatacgcccacgctttccgacgacacgccgacaccatat

SEQ ID NO: 458766 - DNA, 245 bp, Sorghum bicolor
  unsure (1)..(245): unsure at all n locations
gatggtcctcatcgacggccggctacatcgccgccgtcttctatttctggttgctgctgctactgctgtcgcacatgcatctactttagcttactttgctttcttcattcatcgatcctgcattataattaatggcctagcctgcctncgatgtccgatccatacatggtggccatatatatctttggttcgtcttggtgaaacaaaagttcaagaacgaggcttctgttattaacaataagttg

SEQ ID NO: 458767 - DNA, 307 bp, Sorghum bicolor
  unsure (1)..(307): unsure at all n locations
cgtccgagatcgtgtcatgtgcagcctcttcttacacaggctggtgccggctgctaggctcctcggtcattgacggccaccggccggatgaaggagctcgtcatctccaccagctccctccacaacgtgttgaactgttgctgcatccaagagcaatggggctgcttgcaccagctggcttgagctactaactggagttgctaggcaggtactcaactaccactactaatgctatgcaactgaagtcaccatgcanatagaaggcgaggaaggaaatgtgacatctaaaactgatctcacccaacat

SEQ ID NO: 458768 - DNA, 377 bp, Sorghum bicolor
cgtccgctcggtgtgactcggtgtgatccattagcaatgcaagcactaccagaatatttgagttctccgagtgggtgggattctcctagtacttgatagttatgcagcttttagcatttaagaagagttggtttactaccccactcccgactaattgtctccgagtaattatttccgtgtgcccttgcacagttggtaagttgctctttactgcactaggagaaatgcatcaatctggtagtgaagcaagctacattggcattctatgcaatattgatgcgttcatttagagaaaaaatgtttctatgcttgcatacatgagtttctatacataacaattatgatttggcaatctgactaaataaaatatctattta

SEQ ID NO: 458769 - DNA, 313 bp, Sorghum bicolor
cgtccggagcaatgatacattaatggtcaaagctgagacagtggctgctggttcattgtttgatgattggttttcctcacgcaatgttgaagatgaagactggccttaaaaaattcctggtcatgcaagtgttaatgactgtcaaacactttctgccaagaccgaatcaaatgctcgaattaggaatgcagctgacaagaggaaaataaaaactgttcaagacaagtctggtggctagtttggcaaagttgtagtgccatacatttgaacaaagcttttcataaagagactgaggttttatgcattcacaagt

SEQ ID NO: 458770 - DNA, 301 bp, Sorghum bicolor
cgtccgagttgtcagagtatgacgcaggaggagcattttagggacagctactcaactttgtcaactctggagagatctgccaagccaatacatgggaactgacaaggactgatgatgagcagctcatcgtcaaaggcgtatagagcgtagtaggaatccaaaatcagatcaatttcaggcggtcaggaaagagcccaactgaaagcctgaccgaggtaggcgaaagccaaggccaaggcttggagcacacatacgacgccatggacagggacagcaactcggtgttcgacgggagctctga

SEQ ID NO: 458771 - DNA, 255 bp, Sorghum bicolor
cgtccgaccacgcgtacgctatgtgtaagtaccgctacacgtgcaccagctatcacacctgctgctgatagaaatggcacctcaagctcgcctcctccaagagagacgcagcccttcaaggtcacctccaccaaagagtgcttcacggtccccacgtccaaggagtccaaagagacgcagcacttcaaggtctcctcctaggagacgtggtagatcaaggtcaagggatagaaatcggtccaggagcccagatga

SEQ ID NO: 458772 - DNA, 239 bp, Sorghum bicolor
cgtccgctcacgcgtccgacaatcacaaaatgcccagtcgagaaactcactcttaacaatcctctactggaacccctacatcgcctggtcgtacgtgagcatacacgacggcgaacatgatgttcacggcgggttcattgacaaggtgaaggacttcatacaccacatcggctagaagatcaggaggcggtcgggtccgcaagcccacggacgacgtctgcagcatcacatccgacatc

SEQ ID NO: 458773 - DNA, 378 bp, Sorghum bicolor
  unsure (1)..(378): unsure at all n locations
cgtccggtctccgaccacccgcagcagcaacaggccagcacccaacgagcaaagcttgctttcctagcctagtcacagaaacaacagccacacccacggctactacacgcgcgccagccatggcctccgccttcttcttcgacgccgagccggtgtgcgaggtctccagcctgctgctgcccgcgctggacgcctgcgcgctctgcgccaagccgctgggacgcgacgacgacatcttcatgtacagaggcgacacgcccttctgcagcgaggagtgccgcgacgagcagatgcagctcgacgccatccgcgccaggcaggccgncaggtccgccgncggacggaggcagcagcagcagcagtactccttcaaaacgg

SEQ ID NO: 458774 - DNA, 115 bp, Sorghum bicolor
  unsure (1)..(115): unsure at all n locations
gggtctgtgttccgtggcgtcacaccgtggaccacccgagcgtngcgcgcgctctcggtgagaagttctcgagggagcaggcgaggaaggatccttgacaaccttctttcaaatt

SEQ ID NO: 458775 - DNA, 457 bp, Sorghum bicolor
tttaatccagtctgcttttcttgcaagtactttgtggcttacacgtttaattcgtttagaattgatgagagcaatgttttttttcttgcagatgtattgcagaattttaggataaaaacctgtgtataaaaacggcaatacttatttttattatttttattattttttttataatgcacatcattcacaagtagcatgtctgtatggacctcctttgctttcccctggctttacatgaacctttagaagctcgttctactttctcaatcaagtgcctcatcatcggtatcactgccaagtgcgaactggtcaaaagatggttgtaatcagcgtttgtttcagtggatttacgatagtgacctctgatgcagcaccttaatcattacagcctatgttggactggcatgtgtaccgaatttttgttgggtaatggatattggatgctgttacattattg

SEQ ID NO: 458776 - DNA, 126 bp, Sorghum bicolor
cgtccgctcctcgcgccgcatccatccttccgttccctctcgatctctctgctgtctcgcgggtcgcagatcccggtcgagcaagaagcaagccggcgccagggccagcgcacagaggggtgtgat

SEQ ID NO: 458777 - DNA, 283 bp, Sorghum bicolor
cgtccgccgcgccggccttatccattcttctgtgcccgccggctctctaacctacctatcgaggtcgagatccccgtcgagcacgacgcaagagcagagcccgaggacacaccagaagaacatacacgtcctataccgatgcgaatgagaagagctcgcgcctcaaagtcgcgctctgctgcgaaactacacacctctagttgatgaactggcggagattttactaccgcttgccgtacctgttcatcaacaaggcccacgacatgctggtgcagtacgtggc

SEQ ID NO: 458778 - DNA, 370 bp, Sorghum bicolor
cgtccgcttgctcaagtcatcttcctcctctagccacccccagcctgccttgtcatcccactaatctgcttcctgcactccattgcttctgaaaaagctcagcccgcccctcctcccccggtgcattttgttggggtggcgtagactgcctgcaggccggcagacactactgcagagcaaggcaggcaggcaggcaggcatgaggcttcctctgctgggcgccctggtgtgctgcgccctgatggcgtggcagcattgcgcggcggaggcggccaaggcccggcacttcaagtgggagatcagcaacatgttctggtcgcccgactgcgaggagaacgtggtgatcggcataacggggcagttccggccc

SEQ ID NO: 458779 - DNA, 165 bp, Sorghum bicolor
ccgcgcgtgttacagacgaggcaccggatggtggttgtgaaccagacacaatggtcttaagcgttcaaggagtaaagaggtcctggtagacactcaggcagataggtataacagacaaacagtcacacaccaatcaattgtggcatgacacaagcatactgacaa

SEQ ID NO: 458780 - DNA, 289 bp, Sorghum bicolor
cgtccggcggccagcttcctcctcctcctccccaccaaggcactaaggccaggcccggtcggctcaccgcctcggtgaccgccgccttctttgacgcctgcctccgacgctgccgatacgccaaatctccgtgcgtgtttggccgaaatccacgggaggtgctcgtcctcgtctctgctccggagcggagctgtgcctacttgagttcaggtttgtttcgccatccgaggccggccaagattcggagcgtcgccggagggaaggcgatgaaagggaaaggcggggcgat

SEQ ID NO: 458781 - DNA, 218 bp, Sorghum bicolor
cgtccgccgtggccaccgcgtgggacacgccataactggctgcgataattggatctccgcgcacgccgaccagggcattggactcctcccgaaccctagctgcggcgcctccactgcctccaactacaaggtcggcatcgacgacgatgacttcgaggcttgtgtgcgtaggatttaggtaggcacacatgtttcccaaaacagaactcgctcgacct

SEQ ID NO: 458782 - DNA, 122 bp, Sorghum bicolor
cgtccggcccctccactgctccttctctcgcctatgcctcttgacctctccatcgttcgacctcgcaacgcggcaagtagggggtgcggcggtcttcaccgagatgaccaccatcgtgatca

SEQ ID NO: 458783 - DNA, 279 bp, Sorghum bicolor
  unsure (1)..(279): unsure at all n locations
cgtccgcgcgctcttcccgcanacccctcagttccgctccacattgccctgctcccccactccaactggcgtctgcttgcccggtgaatgcgaccgcacgccagagcatgccccgcccggagcccgagctagggttcctcgctgcccccaccgtccccgcccgcgcgtgcaagccgacgccggagcgccgccgtaagaagcagccgccgacgaggcggaggcgaccgcccggtgccgcaccggtggggccgggaccacgcggggcggccgatccagatc

SEQ ID NO: 458784 - DNA, 322 bp, Sorghum bicolor
cgtccgggaaattatggagctggaggatatggaggtgttcctgctgcttatggtggacattatggaaacccaggtgctgctggttctggttaccaaggtggacctccaggctcaaatagaggaccttggggcagtcaagctccatctgcatatggaactggagggtacggtagcagtgctggctatagtgcttggaacaactcttctggtggtggcaatgctcccagtagtcaagctcctggtggacctgcaggctatggaagccagggctattggtatggtggatatggagggatccatcgttcgctagtcatggaggata

SEQ ID NO: 458785 - DNA, 369 bp, Sorghum bicolor
ggtacatcatccatagtttcagaattccgggtgcatcactcagacaccaagcacagttgagtactatatagaacataataattaggtgcatacagcgacagtgcatgaaaatcagatagcaacaagggttcgatttatgctactgcacaccatctctcccagaaggctactctggaacaggggtgcctacttatacttaggcgtggtcatgttcattggaagttcgagttgcctccttgaccttggtagcctgggctgccaccagggtagccaggattgccaccaccagggtatggcgggcattggggtgcctcctttgtatagagaagggtagaggtgtggtcaccagggaaccaggtgggccacctt

SEQ ID NO: 458786 - DNA, 473 bp, Sorghum bicolor
  unsure (1)..(473): unsure at all n locations
cgtccggccgctgctgctagcgcctgtgcttcgggcgggctgctgctggtgaccgagaatcatttcagtccagtccagagaagggtcgggggtgcggcgagctagctgcctatagctaccatggccgcggcgttcccggcctcggccgcgctggcggcggtcgccgtggtggcgctgctgctctgctcctgcaatgtggcgcgcgcgcagacgccggtgttcgcgtgcgacgcgtcgaacgcgacgctggcgtcgtacgggttctgcaaccggtcggcgtcggcgtcggcgcgcgcggcggacctggtgtcgcggctgacgctggcggagaaggttgggttcctggtggacaagcaggcggcgctgccccggctgggcatnccgctgtacgagtggggtccgaggcgctgcacggcgtcttctacgtcggcccagggacacggttctcgtcgctggtgcccgtcgccaccagc

SEQ ID NO: 458787 - DNA, 441 bp, Sorghum bicolor
  unsure (1)..(441): unsure at all n locations
cgtccgagggaaaatcagagaggattcttgtgtcaccttcaccaccaaggtcaagcctttgcactacagccttgacactggaagcaagttctccaactgaattgtgtaggatcttgtttgccacctcatcaccactttcagctgattctaccacaactggaagaagatcagcaatacgagcccatgattggtcttcatatgtccatctgttgtcagaacaatgaacaggaaacttgaggagagcaaggagctgcgatggttgagcgagtccaggtggtgttacctccgacggagttgtggttggagcagccggcgacggtgcgggagaggaccgggagcgggtcgtgaagggcatggcggcggggatgcagacgcagacgggttgctggcaccgcgtnacgccgagatgagctgccatgcgcggctctgactcttcacgtc

SEQ ID NO: 458788 - DNA, 535 bp, Sorghum bicolor
cgtccgccagagttctctggactatctctttgcatttgcggctttggtcttctgtgtaatcatcaaagcgattgcaagaattgagggaaagtcaaaagttttacgctatatattcgggggactttctggtggaacctctagtattccatcctgttatggagatttggatgaaaactattctagtatgaatggaggtcgccaagatggatttggcaagcttcatggtggataccagagacgtacaccaagaagaaactcaccttttgcaggctcagcgaagacatcgtcgccaggtgttgctagcgacagcttctattctacatttcacactaccccagagaggaggaaattctcaaaagaggaatacgaagcattcacgagagaggagacaaagaaagctatgaagcaactgttgtcatcaccggatttcaacaggttggcgttggctaacgcagacagaatatctgtggctccaccaggaggaagctacagcagcagcaacagccagcagcggcatcgtttttgggactgtttg

SEQ ID NO: 458789 - DNA, 464 bp, Sorghum bicolor
acgacccaggcgtccgacgcgttcgccacacgcgtcacggacacgctaccaggcagcagcaatgctagtcgtctctatatctatccccgtcccgctctgcctcggcttcccgacagcaggaggatgaacgtcaccgtcatgtaccgaagcggccggaaggtcgtcaagggcggcatcgacctcaaggactcggccaaggtcgaggatctgcacgaggccatccacgccaggacaaagaagtataatgcttctaggcagcggttcaccctccctattcaacctggaaaaggtgggaagccagttgtcctcaatccaaaggccagcctgccagaatactgcgagtagggttctggatcattgacagtggtcttcaaagatttaagaacacaggtgttggccatcgaggagacgttcaaacaaagggtgacaaatgtagcgtcattgggcatggtgagcccatgatg

SEQ ID NO: 458790 - DNA, 538 bp, Sorghum bicolor
  unsure (1)..(538): unsure at all n locations
cgtccggcggcgtccgcggcccgcccacctcccgcccggtcccctccgctcgcctccctggtcgacgcggtctcgaccaagctcggtcccgtgctgcagcggctacgcgagcacgacagcgaggtaggtgccccggtaattaccgcctctgatcgtctttttctgcccttggatgtttaccggggttaaaaatcagtatgaaaggataaactttaaaagctggtaacatgaatttttccaaaaagctggtaacatgtcagggttcgggtcccactcccacccttgattaataactggactggtctccttggtgtggaaatattggataaaatttggcgtgcacgtagcatgcaccgatgacctgtgattagaagccctaaatccgtgagctacctgatttgcgaaatggcatatgagtaggatgancttaggttgcacaatgcagtgtagcaccggtttggaggtggggagaagcgcatgcaaacgcttcatttttctttgattcgtacaataataataataatagctgcttgatgct

SEQ ID NO: 458791 - DNA, 456 bp, Sorghum bicolor
  unsure (1)..(456): unsure at all n locations
cgtccgcggacgcgtgggtctgcatctccaagcttgtgtttctcctgctgctctgcgccaggatgctgcttcttccggcgggcgtatcctctgcaaagatccatgggaacccagccaacgaccttgtggccctcatcaacggcaagagggcggcgagcaagctgcctgcgctgcgcaacagcagaggcctcgggtgcatggccctgcagtacatctccgagtgcatggccacgggcgccgcctgcagcagcggcaacacggtggcgtgccagcctcccgaggcccacatcacggaggtctacgctgccaactgcggcgtggagctccccacggtggacgtcatctccggccgnctcgtcggctgccaccgggaccgcgacggaccggaggacgcgctgcanngcgtgctggcatcacccaccggcaacggcaacgcggcaacagaccaccaccaat

SEQ ID NO: 458792 - DNA, 530 bp, Sorghum bicolor
cgtccgcccacgcgtccgcttgtcacagagactgtgttgacggcgccatggctttcggtgcgtattgcctgttggacggcgtgtgcaatttgtaagatacagtcaagattcattagcctccttgcagaaggtttgtggaccctaccctgatcctgccattgaacttggaggctccccccccccccccccccaaataattaatcatacctaggttaaccaaaatgtaaatagccagcgaagattcgggttgtactttgtcagcattattcctttttcaagtgtaaaaaggtctgaagatgcttgatatgataaacagggctttgtaggggttgctgcctgggcaagtgggggttgtgcatatgggcccaggtagaatatggttgcacatgtctgctcacagatgatgttgaaatagatagatgcatttgtccagctaatatatcgcttgatatggggcagtatgggcctgcatgaatgaaggaatgttgtcgagtgacttgcatttgaaccctttgatagattctgtttgt

SEQ ID NO: 458793 - DNA, 352 bp, Sorghum bicolor
  unsure (1)..(352): unsure at all n locations
cgtccgatccggtccgcatccggtcctgtgctcaactccggatggcatctgccgtcgccgtcgccgtcccggccttaggcagctccaccgctccgatccttggacaccaccaaaatcaaaagtggtcgtgcggccttgtgcctggacggtcgtcgtctgccagagacagagacagagtcggtggagtccgccagcgcaagatccttgctctggtggtgccgccgcccctcgtttcggcgtctgaccactggggcaactggaccttcctcctaagcaccgccgcgctgggcatctggtcggagaagcggacccccgtgggcaaggcgctgagcggngcgctggtgagcgtcct

SEQ ID NO: 458794 - DNA, 108 bp, Sorghum bicolor
cgtccgccctcgaggagtactggtggtgcaccgagcgctgcctcgactggggcgagggcggcggtcccgacctcatcgtcgacgacggaggtgacgcaacgctgctca

SEQ ID NO: 458795 - DNA, 469 bp, Sorghum bicolor
  unsure (1)..(469): unsure at all n locations
cgtccgcccacgcgtccgcggacgcgtgggtgccggtgcgtgcgtggccgctcgcaaagccccgccccggtgcaccgcatcgcactcaaccacgtccacgcaccatgccgcgccgcagctgcctcactttcaccaccaccaccagcagcagcagctactgccgccgcgccatgtgctcgccacctgcgcctccgactcctcctgcaacgcactgactgacccgccgcccagccagccagccagacgacgacagacagcgccagccacgaccaccatgcgggcgcggcggcggccgtccactgctaccccggcgcctgctccgtccgccgcctccgtcagctcaccgccttctccctacccggcggcattcgcgtcgctgggtccagctccgtcgccgggtcccggtccgggtccaggtccaggtcccgccccggcgccccgagccgtctgctgggcggngttcgtgggc

SEQ ID NO: 458796 - DNA, 477 bp, Sorghum bicolor
  unsure (1)..(477): unsure at all n locations
cgtccgtgtcataataactcgtattggaggtttccttgaacttgaaattcaagaatggcaaaaggcaatatactcttttggtggtaatgaagtaaaaaagtggcctgtgcagttacggcgatccatacctgagggtattccacctagttcaaatggtcctacactccagcagcaagacatggccttaattcaagatagaaacatgccttcctcaccaaacccattgtacagccctcattcaaaatcaagcttcatgaaaggtgcacttggacaatctggcaacaaaaagcagatccttgtagaacaaaccggaatggatacttcaaggngaccactgcacttagttcgcagcatcaatttggttgcagtttcccaagatcattcgttgcatctcacatgccanacagatctgttgacgagacctgcttttggcgaagggaatcaaggcagcagtggccctttcgagtactttggaag

SEQ ID NO: 458797 - DNA, 344 bp, Sorghum bicolor
  unsure (1)..(344): unsure at all n locations
cgtccgcccacgcgtccggacaggcacaacagccgcacgagaggcagcagcagcaggcaagagaagagagagagaggggggagagagcctgggagcaggggggatgttttttttttttttttttttttttttttttttttttttttttttttttttttttttttttttttttttttttttttttttttttttttttttttttttttttttttttttttttttttttttttttttttttttttttttttttttttttttttttttttttttttttttttttttttttttttttgttttntttttttttttttttttttttttttttttttttttttttttttttt

SEQ ID NO: 458798 - DNA, 306 bp, Sorghum bicolor
cgtccgaaaaaaaaaaaaaaaaaaaaaataataaaaaagggcaaacaaaaaaaggggcggcacgctctacaaagctcctaaccttacataccctaagcgggcggatgggggtcctcttatttaaagtcactgtccttcaattcactgcccggcgtcttacaacatcttgactgaaacaaacttaatgttcctcaacctaatcaccttacagccagtccgtgttataccagctgggtccataactaacaggcttgcaaacaactcctcttccaacatggggactgacagactggctgatgggacgca

SEQ ID NO: 458799 - DNA, 466 bp, Sorghum bicolor
  unsure (1)..(466): unsure at all n locations
cgtccgcccacgcgtccggcggcgtataacgttaatggcgtcggtggccggaggttcctcgtgcagtgggtttggaaccccgtgctcagctactgctccggccccaacgcgctcgaccagtagcagattcgactagctgttcttgctgctgttccggtttcatttcatctgcttgaaatgaaatggaattttgccatccgttgtcattgtgcaaaggatgatgattctgctctgcctctagtgcattggatttccttgctctggaaatccatgggatgtttctgtatagagttgttattattaatggcacgtttgatggggggagaaagaaggtggtggtgatgactgatgagcaggaggaggatggcaatggcatgtcttatgaggtgaatnttggaacttgttattattaatagtaagatttacctgtttaccanacaagactttgtcgaatatttatttaatg

SEQ ID NO: 458800 - DNA, 425 bp, Sorghum bicolor
cgtccggcggcagcggcgtgggagtgggatgcgcaagcgggcgggacgaaagcgcgtgctccacaccctttgtaagcgcgccgtccagccccgcccgcgacccgtcgttctccgctgccggttgcttctacagcgcgccggcgagccccgcgcgcggcggccccggcaccgcggacgagtatgagtatggctgcgagctgggattcgacttcgacttcgacttctcctcgcgctgcccgtctcccgccgcggcggcgatgtcctccgccgacgagctcttccacaacggccagatccggccaatgcggctcgcgtcgttcctgctccgcccgcaggcgctcccgcctctcgacggagacgtcccaccgccgcacagccgccctcggagagccggcgcctgcgggggccgaggcggacaacgcggc

SEQ ID NO: 458801 - DNA, 416 bp, Sorghum bicolor
cgtccgcaccattcatctccgcctcggcctccctctcccctccctcggtccctctccgctccaaaccccatccatggcgaccgccgccgcggcagggagcaagaggggcggcgcccggggccgcaaggcgctcgtggccgtgctcgacaacgaggccaacatctccgccgggaaggccgctgcgcaggccgccgacctctcggcctcctccgcgcagaagaaggcgaagcgggcgccggcaaggaccaaggccgccgtcgcggcgtcggcggtcgtggacgacgtcgccgagctgcaggggatgctggagcgcctgcggctggagaaggagaaggcggaggagatggtgagggagcgggacgaggtcatccggaagaaggaggaggagacggaccaaagagaagggcaggggcgcc

SEQ ID NO: 458802 - DNA, 485 bp, Sorghum bicolor
cgtccgcccgtttccgtcggcggcccgccacagatttttctcgtccccgtgcgtctcctcctcctcctcctccccctcccccctgttgcttttgcttgcttgcggttgcaggcagccgctgtgccgcgaccgcgagcgacctgtgtagtagggggagggagggtcggagggagcgaaagaagagaagagaagagaaggtttggtggttgtttggtagaggagaatagttggttggctcagggtcaggggggcgaagatggagcgcaaggtggtggcggtgtgcgcggtggtcggcttcctcggcgtcctctcggcggcgctcggattcgccgcggaggccacccgcgtcaaggtttcggatgttcaaataagcagtactcctggtgaatgcatatacccaagaaccccagccttagcacttggtttaatatctgccgtctcccttatgctcgcccagtctatcataaacacggtcgctggatgca

SEQ ID NO: 458803 - DNA, 399 bp, Sorghum bicolor
gctcaacagtaataccatgtaccctgtctatttattaaagatgatccataccacaatctcaagctgatatgacacaatctattgtccaagagctaaaatgtcaaattttctagggcattttttcagtcgtagaacatttttttagatcaaaagacattgcccagctttactaaagtatatcaagccaacaaactacccccaccggggaacccaaagggcagcaattgaagtcacactacagaacagattacagattattagcattggtcatgataatctgagtcatctcctctgctaagggtttgagtttcggcttcagtaatgggatctatgtcttcatcaaggaaatcgacttgtaaaccatcaccaccggcatagatagcgtcttcttattaaaca

SEQ ID NO: 458804 - DNA, 467 bp, Sorghum bicolor
cgtccggccgccgcgagctcctgctgtccgtcggtgcagctggcggggctggagccgccttccggacggttcatcttcttcggcgagcaaggtcagtccggccgtggtgcgggcactgtcagttgctaaggagtcttgtcgcccccctgtaccgcagctgcaatgaagatacagaaagcaaatgcagggattcttactaactttgaagttcttgacttcttgcaaacaagaggtgccaaagttgaccctatgggatgcttgggggctgttgctgcatcagagtgtaaggtgtatgagtacctcttaaaaacccctgcttgcaaccagacaagggaatcaatttatgaatttgtgaagagaagtgagggattcaagcttgcagaagctgataagctaaatgtcatcaactggagaccatcctcagctgccgatgcttatgcgatgatagaaaaatgtgggaaacgatt

SEQ ID NO: 458805 - DNA, 489 bp, Sorghum bicolor
cgtccgcgacgttcgaccacggtggcggcggcgcacgagaggctgtacgctgcgccgaaccgcgcgcaggcggaggagatgcggcggcgcacgttccttccctaccggcagggcctcctgggctgcctgggcttcagctcccgcggctacggcgctctccacggcctcaccaaaaccctcaaccccgtattctcccggtgaaaagtcgccgtcaaaaggctcccaggaaaaaaagagagtataacgaaagaaaatcagagatcagaccaggcggagcttgagaaaaaaggtgttgagccgatttgattagccacctgttcgtcatgttcatgtaatgtatgcgagcattttttttttatcttggttgttttgtgtgcgttctgtatagcggtaatgttgagttcggagtggaaggtagtttggcgatggtcacgtcaagcagagcatctggatagagaggcagacatgcaatgcaattcgataaatatg

SEQ ID NO: 458806 - DNA, 331 bp, Sorghum bicolor
cgtccgcggagacctcgcactccaatggtaccagtgcaggtgaacgagccaccaccaccgcagccatcagacgttgacgactctatggcatcctctgggagtaaatccgattctaaggactcagactaccaccctagtgactctgaggagtaatggatgattagatcttccaaaccagaatatctcgtagcaataattgaaccacgttgtatttgctagcaatcaaattgtttctgcgatgatacccgaatgaggctgcttaattttctggtatttgcgtgttgtttgatggtctggattagttgaaagattctattattcggtttgatgg

SEQ ID NO: 458807 - DNA, 528 bp, Sorghum bicolor
cgtccggagcacctaggttttcctgcacgcgggcgcgcggcgcggcgttgcggcggccggcggcgacggcgacagctgcgcggccagcagcacggcggacgggatcccagcgacgcggcggacgggatcccaacggcaacgggcagcggcaggccggcagcggacgggcgacgcggcagccggcagcccagcacgccgtcggtaggcggcagcggccactggccggacggcggacgcccacgcgagcagggactgcacgcgcggcgagcagccgagcaggcaaggcgctgaggtgtattgcaatttgcaagacgccaagacgcaagccgccgccggcaagcaagcgacagcaagcaaccaagcacctagcggcagatcatggaagcttttggagacgccactggtctgcgaatcaacatgaccaaaagcacggtggccacaatcagatgcacaggtgtcgatcttgacgagtatatccaagacagggcaaagaacaaagtcgctggctggcagggtaaaatgatcacg

SEQ ID NO: 458808 - DNA, 276 bp, Sorghum bicolor
cgtccggccagtcatacgaggaacacacacggcggagggagcggtagtcgcaacggccgagggcggagcacgcgaggcatggatagataccacagggtagagaagcctccgaatgacacgccaatcagccagaatgagatcaagatcactacttacgggaggatgaggaactatatcacctatgggatgtccttgcttgaggaaaatggccatgatcagattaatactcatgccatgggacgcgccatacataagacagctatagatagtgaatcg

SEQ ID NO: 458809 - DNA, 491 bp, Sorghum bicolor
cgtccgtttaccttctcaaatttgagaaccagtgcaattttcatctttacagcggtattggtagtggtttgctcatggcatccggctgggctagatttgcttcgtcagcaaactaactagccatgtcagcaagctccctcatataatgattcacaaggattacagggtaaaagcatagataattttccttcatgtcttatgtgttctctctacttttcctatatctgaatgctaagagggatccacagcaacattacaatactactttgagaactatattgaagagttagttgtacaatgctttggcttggaaaatgggtattaaaaacctgcttttctagaggatctaatcaggagttcaggactttaatgaaactaaaaaggggcaagttggatatttctagtctttatatgtcattccctactctggttcaagcaaaaaatgagataaaacttacagttcccctatttcaggactggtttaatctttt

SEQ ID NO: 458810 - DNA, 298 bp, Sorghum bicolor
acaaagccaattacataatatattcccaattaaactcatgaactgtgcacagaacaaggaagtagtttcagttctcagcctggtcagctttactaattgcagcgctcctactacacagcagccactgccaagctcttggtacctatctagaaacagaataaaattccacctcacacacaaccactgccataaaaaaaaagacagtcgagcaaaacctctatttgcttaacatgttcacgctgcacgcacattacaaaaacttgaatcccacaattcattctggtcactgacttccttt

SEQ ID NO: 458811 - DNA, 450 bp, Sorghum bicolor
  unsure (1)..(450): unsure at all n locations
cgtccgcccacgcgtccgcaattacctcgtgtaccaaaggaacctgctctcctagatgagagatctctattggcttgcattgttcgtgctgttcctgctggacctgagggtggaatcaggattagttcaactctgccaaataggcttgggaaaatgttggctcctcttcactggcatgactataagaagcaatatgggaagcttgatgattttgtggctagtcatccagagctgttggtgattgaggaagacttcattcaccttcgggaaggagcacancagaatcattctgctactacagctgctgcaaaaatagctgctgctacagcatcttctgccccttactcgtccttactgncttctgttgctgttactcctgtggcacaaagtactcggcaaaagagggggcctgcagttgattccagatcatcaaatgcaattccctttgga

SEQ ID NO: 458812 - DNA, 474 bp, Sorghum bicolor
cgtccgatcctgtactaccggacggcctttcctgtctcttggttagcttcctgctaactctgtttgtttttctctaatatatgcctggggagctttgctccacagttttcctcaaaaaaatcctgtactactggacttctttttctttcttggtttatgatacgtttttttcttcttattgttgttttgcttgagttttttcctttttggttttctgttttgatctattcatatgcctttaattgttttgccatgaaatttttatccctgttgacttgaagtttcagattatttagtgttgttacatgtaggtaagcttttgttttaagggctgactagataatttaggatgtcagtcattctatgtgattggaataaaggactaaagcattagtggatttatgcatgtgtttctgtaaagataagttaacaagcatctggtgggctgtgtggatggtgtgcttataagtgata

SEQ ID NO: 458813 - DNA, 315 bp, Sorghum bicolor
cgtgcgctgatatactgtcgctctgctccttagaattgttaggccactatggccgccaacttatggacgtcgctgattcttatccagtgactggaccccgatgatgtggacctggtgccggctgcagacctggagcggtgcatcacgccagaggagatacgtcttatcaagagccatatgtcgttccatatctgtgtaggctggcacaacatgttaaagttaggcatttgggctcacggacaaattttatctctgtcgttgaacctattttgttcaatcttatatacgttgtcttccttctactggtattttcat

SEQ ID NO: 458814 - DNA, 253 bp, Sorghum bicolor
cgtccggtgcacacacgatcatcaacgaaaatgtgaacaggaaccatccaacatgcttttgctactgaggtatatagcggttgctgcggcggaggacgacaatagatgagagagagcaagggaggcgagcatcgactaccacactgatgaacccaatgctggatcttttatgggtaattagtactacctatcatcacagaagatattgcacttcatgctgtgacccagcaaccagttagtggaagaatatgtg

SEQ ID NO: 458815 - DNA, 371 bp, Sorghum bicolor
cgtacgcgccacctcattccgcagccgaggagagatctcatctcggcttctccgcccccgtcgacgccaatgcctgcctccgcatcctccgccggcgcgggcgccgcctcgccttccggttccgcgtccgcctcagcctccgatccgaccccgtcttggtgggagtccgtctcgcaggcgcggtcccgcatcctggcgctctcctccatcctgcccgccgcggtctcccacgacgtggcggcgctggccgacgccgaccgcccggcgcgcgcgctcctgcgctcgcccgcggcctacgcggggctctccgacgcgctcagggcgggcggcggcgccgacgaccccggctgccactggctctacgacacgct

SEQ ID NO: 458816 - DNA, 298 bp, Sorghum bicolor
cgtccgatcagacgtgctgggcactaatggcggacgagctaacatgtatgaaacggggtaacgttgtacagacagaagcaacggactgtactatagccaaggaagagcatcatgagtacattaggatttgcgcttgatgctgtcttgctatacctgtgttccgctgtgcccatcataaatcaggatgaaacgacccggtggagagatatatgctgagttggcatatactgagctgctttatgtctattgagagctagttgagatatgatattacgaacaccacttgtctgtatgttga

SEQ ID NO: 458817 - DNA, 462 bp, Sorghum bicolor
cgtccgggcgagcgagcgagcgagtaagcaggagcgtccaaccccgccaccgccgccatgaagcgcaacccccggagccggagccgggagaggacgtggcggtgttgctggtgcacccctacaccatcctcggcggcgtgcagggcctgctgcgcgggatggcggagggcgtcgctcggcgcgggtacaccgccgtcaccttcgacatgcgcggcgccggccggtccacggggcgggcgtcgctcacgggctccaccgaggtcggggacgtcgtcgccgtctgccgatgggtcgcagagaacatcaaaccgcgcggcatcctcctcgtcggatccttggctggggcaccaattgctggatctgcaggtgataaagtggatgaggtgattggttacgttagcatcgggtacccatttggtctgatggcctcagtcctattcggaaggcattatgatgctatac

SEQ ID NO: 458818 - DNA, 96 bp, Sorghum bicolor
acgcgtccgcccacacgtacgatcaaaaatattatatataaagaataacaaaaataataaaacacacttaattttataacataaaaatatatatgg

SEQ ID NO: 458819 - DNA, 535 bp, Sorghum bicolor
  unsure (1)..(535): unsure at all n locations
cgtccgccaaaggtcaccatatgcaggattatcatcttcaaccttacccaatgatacaagaatggctgcttctcctaatcttggccgagattcatcgagaacaggtaaaaggctcaaacctatcaagagagccctcggccggcgctccactacggtagaggaagatgaggtaggagaagatgagggtgatgaagcaaccaagatccaagcacccacttctgggttacgaattcctcgatcctcaacttccttcaataactctttgtgccatatttatttggttcctaaaattttaaagttaaaatttactgtcttcgattgagtcgtggcgggatacatatggaaactctaccatttgaagttgtgctagaagatgtaggacaacaaaggaatatgcagcagcaaggaaggaaagatgcagcatcaaggagcgtgaataggatcaagtccttgctgtcgaaaccggaagtcctctgttggtagtgcttcaaatcattcagaaggaatacagangaagtcatctgacctacatgtg

SEQ ID NO: 458820 - DNA, 454 bp, Sorghum bicolor
cgtccgcttacatttttgacatgcggttgccactgggagagagcaggtaggcgaaaggcagcgacaccaggcgaagcgagcgccgccatcttccgatgcgatgcgagcgggcggagatctggtgtgggtggatcctttggtccttcctgaagtagtgagggatcccttcatcggtgcttgggctcatcaccggagcggcggcgccaggaacaacatgggctcacatctcgagggtggcgcatcggcgtcgcacggacccggtgacggcgggagcacaagtactagacatgagctacctgagctcgtatctagagttgcttctggtgggggcggcggtcgagctgagatccaaggtgctgggcttctttacgcattaccatccccaacttggggagttcaatttcaataagaaagcatacagttcaagcgattagcatgacagaagctacttatt

SEQ ID NO: 458821 - DNA, 323 bp, Sorghum bicolor
cgtccgcgaccgttgggccgccgccgccctatacgccaggtgctgaggctttccctggtctcttcgccggcgacgagcacaccagatatctagtcttcagtacagaacttggtgtagattgtgatgtcggtgccaatgtttaagaaacagaactcattgagcacccctgtccacaagacaaacccgtttgattcagattcagattctgaaaggccatcaagggcacagtctgttccagtacgacacaccaatcaattctgtcaagagttggaagattatgctataaccaaagcaccagaaaccacacacaaagttaatgattg

SEQ ID NO: 458822 - DNA, 354 bp, Sorghum bicolor
cgtccgaccacgcgtaccagcacgcgtacgcggacgcgtggctggacacctgtaggtcctaaagagagagccccgcaatatggaccatcggtacactcaaaggcttatgagcactaagcgtccactactacaaataatgcagcaacatgaggatagacagacggaagacaatcctatgtacaatccatacatgggacactgccaaagcacgagtgaactactgccgcctgatattgcagtgaaggatgatgatgaataacccagactgtgctggactgtgcttatgacgaatgcgagacacggctaacagctggatgacgttggactagccacgtacattaacatgtgttattc

SEQ ID NO: 458823 - DNA, 336 bp, Sorghum bicolor
cgtccggctacaccgaaccgctcactggcactgctcctgccgctgtcggcgaccagctcgatcctcaacatgagcttgaacattggccttctgaacgaggtgagcgacacggcgatcgacgcgctgctcctggaccaggacctgctgacggacgccgtgatcgaggccatgatctatgcgatcctgtcgcaggtgaaggaccggacgaagggcgagccggggtggcacaaggtgtggaccgactactcggccgactagctggtcttgaacgcgtacttgaagttgttgtcgcggctgctggaggcgcgcttgacggctctcagcattcacttgatc

SEQ ID NO: 458824 - DNA, 59 bp, Sorghum bicolor
acgcgtccgcccacgcgttcgcccacacgtacgtatgattgttcatacaattgatctca

SEQ ID NO: 458825 - DNA, 251 bp, Sorghum bicolor
cgtgcgcgtggccaggaaacaaaatggcatcttccatgaaatttctctgcatacttggactgattctcctcatcggaacagtcgtcgacggtgcaggggaatgtggtcgatcttcgccagacattgatgcgtttaagctggctccatgtgctggtgcatctcatgacgctcacttcgctctgccaggaggttgcagtactcagattaatagattcactcattaccctaaatgtctatgcgccattcttctt

SEQ ID NO: 458826 - DNA, 452 bp, Sorghum bicolor
cgtccggacccacgcgtccgctcctcctcccttgagtttgcgtcaagaactggcttcttggatgcccatttatcggcccttgtagatggtgccgccactcactctggggctcagacgctgatcatccttgttgatacgtcttgccctgggagctctcaccggctccttggccttcttctacccatgctgcggtggatgtgccgcagtaggcagcgtggaaagttccagaaccttgctactttcatcatgtctgctggcgtagctgctgcgtttgcattccatggggtgcactttgtcaagctccagcgccggagtgcctctgcattgttacataggcctcttgcgcactgtgggtggtgtgcgcttcatggttccaagatatctgaaccgcttctgtcagttgatttctcagcacttccttcatacttttggagcttgcaatatgctgtagc

SEQ ID NO: 458827 - DNA, 487 bp, Sorghum bicolor
cgtccggtccgatcctgtcgatcgatccatgcaaaagagcttacaacggtcaatacttatagaccaatggtgcacaatgatatgatggtgggggccttttcacactcaacagcagtcggcaaactacggcaggagctgccagatgttccttctgatgctcgtttgatctttccacgttacaccttagatgaagctgagactgtgtgtcactattacatgaggcaaaagatcattcggcgcgagaatttttcagaagagaaatggaaaaagatattttacttatcaaatggaaatggtgcagagatgagatggcttgctgcctttgtttgagtttctgatacctggattatactcggttttgatggtggtctagaaaggttgccacttctgtctcagcatgctgttcgacaccacaagtaattgttgtatacttggaagttgtctcacgacatttctagcaaaaaatttggcgtcaacattatttttt

SEQ ID NO: 458828 - DNA, 193 bp, Sorghum bicolor
cgtccgatgaagctcttctgctgcaattcgtctctgtccttaatctggcgtcggccccgctgactgctcagagctctatcttagcgagcggctatgtatatctcgccagccatggcctgccacacacgagacactcagtgtcaaggccctgatgaaccaatcactatcattaatcactgagacttattactca

SEQ ID NO: 458829 - DNA, 364 bp, Sorghum bicolor
cgtccggcgccctcttcgagtaaatgttgcagcagagcgaccacagaggggcttttgatgcggtggtacgagagagatggctgcttgtttgtaatgagaacggagacaacggaggagcaatggtacaaattagcggaagctgatgctgtcacaagttgctagatccctcccttagcttcctgatgtttggttcttgccacatagctttttgatgcttctcttggcagctggacttgatgttttactattcttgtcgacatcatgagttgaattatccaagtaggcttctatgttctatcgatatgccttgatcagattctcatcgtggcttataaaactaataatttattataataatatattg

SEQ ID NO: 458830 - DNA, 125 bp, Sorghum bicolor
cgtccgttggatttcgattctctcagtgtccttaactgcacagtaggcacacacacacaccatccagcacagcagggacacggccgccatggctgctggtggtggtgcgcctgttgctgcccccc

SEQ ID NO: 458831 - DNA, 150 bp, Sorghum bicolor
cgtccgatagacccagaaaacacttacgttttccgttcttcttgttttgttttctgtagagagaactgtcaacttcatcagtgtattgcattgcgcgatgtaaattcccaagtcgaaagttgtttccttgtcttgagaagtataacaaaa

SEQ ID NO: 458832 - DNA, 522 bp, Sorghum bicolor
cgtccggaagctctcgcccggtcgcctccctcctcccgatccccaccgccatggccgccgccgccgcgtcgtcctcctccgagggtccggtcgccgtcagcacctgcgtatccctcggcgaggcagcggcggctccaggcggcggcgaccgggcggcggcggattgcggggtgtgcgccatctgcctcgacaggatagcgctccaggagacggccctcgtcaaggggtgcgaccacgcctactgtgtaacctgtattttgaggtgggcatcctacaagcagaaccccctgtgcccacagtgcaagcatccatttgaattcctcagcgtgcatcgctctctcgacggctgcctacatgactacctgtttgaggagagcgtttgccttctcctgagggccgcttggtttgaacctctgatcgtagaggctcacgaagagcccctggaagatgaagagttttttgaccagcagtaccaatacgatgacgatgaagatgatcttgatgaagaatcctattacatga

SEQ ID NO: 458833 - DNA, 183 bp, Sorghum bicolor
cgtccgcacccacagccggccagggccagcagccccccaacccatgacaatggcacctgagccctcagccggcggagcggcaccgccgggcgctagtagggtgtgggagtgggaagggaaggtggcgtctgcgttggccgatgcgacggcggacgaggcgtgggcacttctgtcgtacttcct

SEQ ID NO: 458834 - DNA, 553 bp, Sorghum bicolor
  unsure (1)..(553): unsure at all n locations
cgtccgcggacgcgtgggctgcctttcttctcccgtccacccctagtgcgctcgtctctctcggcgacgactgggctaccgccgccgccgccaaacttcgtcgggctcgccggcgacgagctcccaccaggatcagaggaggtggtgatggcgagaggtgacagctgcctggcgcgcgtgggtgccggagttgccatcggtggcgcggtcggcggagccgtcggtgcttgctatggaacttttgaggcattcagatacaagatccctggattgctaaagatcagatacattggacaaaccactgttggcagcgctgcaatttttggtcttttcttgggtgctgggagcttgattcactgtggaaaatcctactagtttgtttccctcctttttctgaacacgactttgtcgatgggcttcagaggaggattcttgattttgagtgctaccctgngtggcttcagtcaaaactattcaatgtctgtacaatttaacagctaatagctcagggttggaaagaacaatcaagttatgccccagtgttggtgtggat

SEQ ID NO: 458835 - DNA, 499 bp, Sorghum bicolor
cgtccgcggtttcagttcaaaaccattctccactgtagctcctgtcctctccctccgctccctctctctctcgtcgtctccccatctccggctagggtttgcccttcccaccgcgtccggcgtctacctcgcctccgccgctgcggggaccaaggatgccgcaagagcaaggtgtggaggagccgccgccgcaggcggaaggcgaggcacagccggccgccgatgtccccatgagcgaggccgcggcggcggaggatgaggaggaggaacccgtcatgggggagggggagggcggtgcatacggggccgacgccgccgttggttccgtcaaggcttcagtgaagcccgaagcagagggcgcggaggagggggacagggaggagctgaatggtggcccgacggcggatttggttggcgaggctgtgaaactggagaacggggatgggtccgtgacggtgggtggctcggcggatgaagctggagctggagatggcggtga

SEQ ID NO: 458836 - DNA, 546 bp, Sorghum bicolor
cgacccacgcgtacgcgtacctttacaccagggcagtccggatctggtacctctcagtcaagtgaaggaggttcagataaacctgcaggatggagaaatcagagctggttctacatagttgtgagaataagtttgttcctttgggttgctttgctaaatctcattacaatatcgtcaacttgggcaagggtaattgatgtcatggacagtgagtcaggttcaagattatttggttttattggggctggtgctacgctagggcaactttttggttcattgtttgctgcaagtatggcatggctaggaccatttctgcttctattttcttcactcttgatggaacttgctgctctgtcatcaaaaggaatttgtattgatgatggaaattatgcttcgactgaattatgtcaaacaggggcaggacaatctcctaataccgtggctgatgatgaaatgtcttcactggtcactttacctagatcaactacccaatctcaaaaatccaaatctgaatttttcataatgtttgaaagtttctggctgatc

SEQ ID NO: 458837 - DNA, 452 bp, Sorghum bicolor
cgtccgctaaatttttaactgctataaattcagttggtaaggcagtatgactaaagtagttgtttatagtgcatccgtatgcttagttcttgttctctgttattgtgctcttggcaacaactcaaatacttgaagttgattcaaatttctttaagaattatttcagtttcactagagcatcttctgttttctaacgctggctaagtgaatcagctgacacactgctaacgacctgcggaactttcggacaagggtggcctacagtctcagcacaacaacgaactgcagagttccagtagttaacgtcaggtatcttggaccgacaaaatgtctacctcatcatttttgtgatatgcacacgcacttgcttcacatgaagaaaataaatgatatgtcatgtgcatgttaaactctttgtattattaaaaacatacctccaagcgtgcactttc

SEQ ID NO: 458838 - DNA, 159 bp, Sorghum bicolor
cgtccgcggacgcgtgggctcgcacccacccaccttgatcctctggtccgttggtagcctgatcgatccatggacacccacgtcggatccgtgaacggatcggcggcggcgccggcgtcgaacgacacggtgggctgcccggcgtcggcgccggggtgc

SEQ ID NO: 458839 - DNA, 440 bp, Sorghum bicolor
cgtccggcacaaccgagtggttccgagcagagttgaaggagcgggagatggatgcggagaaggctgttgctgccgctgaggcggaacggaagagggaagaggaagttgagaggctgctcaacaaggtgtggtggtactcgctgttcctctacttcggcaccatgatcgtggcgatcgcgccgaacttcgcgccggcgcccagccccgccgccgccgttccgtccctcctcgcctgctacgacgtccgctaccgcctcaccgccgtcttgttcgccgtggtttcgctggccatgcaggcgatgctggcgctcgtcctggagaggaggcccgcgccggcgccgcacctgacaccgctggccgcgtggccgctcggcatcttcaccctgatgttcgtcaccacgttctgcctcagctgcctctcgttcggcgtgcggaactac

SEQ ID NO: 458840 - DNA, 521 bp, Sorghum bicolor
cgtccgctcagcaagatgaaaatggcgacttctctgtatcaatctctgcaattgaggacagcctggtctcggatgcaccgggggaccatttttgtgaatcactctgccccttccgcacaagagaagggtgcagatggccagatgctccgtgtgcacagcttggaagtcagttcgtcggtttgaaggcaaattttgatgcttttgaccggttgtcaatacaggactgctattttggaccagagtagttgatcatgaaccagctgtgtcagtacacgcttggcagttgccaatggattttttcagtagttggcacctccaggtctgcatcaatagcaaaagaatgctgggaaacaactcaatgatgcatatttgacgagtatttacaaattccttcattcaatattttttttcactatctgggtcctccgaatctgcatcaacagaatagcctggaaagcaaatcaaggatgcatacctgatatgcatcacaggatttttcttgttccaatggtcttataagc

SEQ ID NO: 458841 - DNA, 523 bp, Sorghum bicolor
cgtccgatgatctctcagaattcgattgctcagaagattaatcactacccttagttgacccttcatcagctttatgtgatggggaattcaatgatacctacctgttcagtgtgcaaaagaatgtgaatgcatatggtgaacatatttaccaagaggatgtgatggagttgttgcccactgaccagatatgcagtggacatgaaaacattgatatgttgcaggttggaaaccagttttcatatgaaaatgcaattcaaggtattgaagacaagaaattctctatagcgtcaacttatcagctgagcttctgtcacaatttactgtatctaaggcaccacttaaatctcagttcaccaagcatcattacttttgagtcctatgctaaaaagtctggtccataatgcggttcttttgtacataggaattcaaaagcgcatattaaaactttgaacatgcaagcaatacagcttacaaatgattatgacatatacagactttctctaacattgacgagaagagcttc

SEQ ID NO: 458842 - DNA, 387 bp, Sorghum bicolor
  unsure (1)..(387): unsure at all n locations
cgtccgattcagatgtgtgagcaagctgcagaggcacagaagtcaaaaggttcacttgggcggcgtggtagaacaagctctgatcctagtggaaatagcagggattctatatcagttgatgctattctgtctaagaatttatctacatcggttctgagtgccgaatcttcatccaaagtctacctcatcaactgcttgtcagctattcaggagccattgatgggccaggaggttgctacaagctatgtaaacaacctgcgctctatgattgaagcacatatttgtgcccttgtcgataaagaagtngacagcattcttaggaaatgtggactgtcaaataagatgccatacataaaaggagtatggtagcaaggctgatgcaaagcc

SEQ ID NO: 458843 - DNA, 179 bp, Sorghum bicolor
cgtccgcgcagaagccatattcatacgaatgccttttgtggcctggcccgtttgttcactgtgcagagttcgatgccctttgtttgttcttgtgtatcactattattagcattggtttgtagcagcgcctgtgttggttctatttatttatatatgataatctgttgggtattggagtg

SEQ ID NO: 458844 - DNA, 522 bp, Sorghum bicolor
cgtccgggttaccttcctcaaccacattctgcccttctggccctcatctctctccccatctctctagtctcttcagtaacaccacaatttgttactgacacgccttcagtctgttgacctgctactagcgaaatttggagacccaaccttctgtctctgaaacttggagttcccaggggggaggttctgccaaaattttggcttctgaacatccatttgcagggggaggttctgccaaaagttgctcctgtgaacataagtttcccaaggggaggttctgccaaaatttccacctgtgaccatcaattttccagggggagattctgccaaaattttgtgcactaaccgtcagtcttacaaggggaggttctgccaaaagtttcttctctcactgtcacttctacaaggccaagccctgccaaaagtttcttcacatacatcatagatatatacaacaaatactaatttgcagggtaaataaacaagagtactctcctgcttgtccttgatgataagcttgaa

SEQ ID NO: 458845 - DNA, 544 bp, Sorghum bicolor
cgtccgccagccacgcccacgccacgccacacccctcatcatatccatcgtcgcccgcggtttttcacccacaccacccacgagctgcctttatactaacgtgccggctctgctccccacgcatgctcctgctcattcccggccgcgccgcggttcttgcatgcttttcgtcggcgccaggggatctgcggacggaaaagggaaactgtctcggccgtcaatttaaaccccacggcaagaccggatttatatattttgctggaaaaggcagatcttgatcttgatcttgatcggttcctgctgctagcttctgtctgctctgctggggggggcttgtacgaacgtacgtgttgatgaagacgacggtggaagggagcggcggcggcggcgcccaggccgcggtcaagaggcggcggagggatgcacctggtggcaggcgacggagcgtcggcgtgagcgtgcggcggcgcgtgcaggtggacgcgacgacgaccgcgccggcgccgctccagagtctgcttgccgcgtgccgccgcgcgttcgg

SEQ ID NO: 458846 - DNA, 66 bp, Sorghum bicolor
cgtccgaaaaaaaaaaagaccataagaagcgtgaatatctaatatcaaatgaaaacacaaaatggg

SEQ ID NO: 458847 - DNA, 498 bp, Sorghum bicolor
cgtccggaaagtgttgttacggaggtggaaagggtattgtccaatccaaatatgcctgaaatcgagaaggcaaggaaactgctgaaagatcaggagcagtcattgcttgatgcaattgccagacttgatgaagcatcggatagcgatagtgaagatatggccatggaaggccgaatgggttctgctggggaaaggaacggtattgctacttaggtgctgtttggttgtattcggtaacgtaaatggaaaaggattgaagctatggatgttacggcaagacataccacttgaacaaatttcatttccatttgcgctacagatgtacgaaccaaactgcacattagttgcttctgccatgttggaattggaatattaacatgcatttgtgtaccacctacctcgaccacagaacaaagaaaccgcattatggcaaatctgggtaaaaaataaaaaaataattataaaaaataaaaatattttactttataaatatataaa

SEQ ID NO: 458848 - DNA, 493 bp, Sorghum bicolor
  unsure (1)..(493): unsure at all n locations
cgtccgggtgtctatgagaatcttatttcagttctggggcctaacatattttgctggctctgccctgtattgaatactgttggaaatggcctccggtaccgtacatcctatgatattccgatatctacgccaccaatgtgataacaaaagatagcagcagtcacaataggtcagggtcttgtaactctgcaagatacaggagatgatgactaccacagcctctcaccaggtgtctatcctgagtcgagacacgaactcttaaccatgtttttttttatttcattcacatacttgataaaattcaatctgcctcgcttgtaatctggagtaggctgttcttaccaaaaaaaagaagcactgtaattctgttgtaaagttcatgtgtttgagagatgagagccatgtaatgtagccagaggtcatgaaaaccatttttcccagattanttgtgtacattngtttagaatggaatgtgacatctgatgtacttttg

SEQ ID NO: 458849 - DNA, 527 bp, Sorghum bicolor
cgtccgggtggttgcaagtatcaactaccttgatagatggtttgattcaaccagcatttgtgaaatggattgaagaagaacaggccttggaaaatggacaaatcaatgaaaaacttatgaaggtgataagcagtaaactaaaggaggacaataagatcttgaggaggtttaacagattcgggaaatctgaactctatttggatatgctctttttcctaagatttggttctgctaggtctgacagctattatgatgtcaaatttcttgctgaacatggagaaagaattttagaggaccttgttatttccttagctgatgtgattgctagtgtttatctggagcttatgtcagttgatggtgatatgtctactgaagttgttagttccagcttagttctatgttctctgtcaaccagagaacttcaaaagctgcgcaatgaggtggcaattaaattggggttgcaccaatacttcaagtcagttgtttcaatgtatgaagacaggttcgagttatatgttctatgcagc

SEQ ID NO: 458850 - DNA, 428 bp, Sorghum bicolor
cgtccgaggaatcaatccgccccatgcccacatccgtcgccacgcacgcatccctcctcctcaaagccgcagccgccaagcccttcttctccccccgcgcggcggcccggatccacgcccccgccccttctcctcaccctcctccgcccgccggccgccgcctgccgaccacggcgcccgctctcgccgccgcagcccgccggttccggtggccgtcggcggcgcgggggctgtgcgccgcgccgcattccggcggcgaggcgatgggatctgaggcgggggtcggggccaggaagaggccggtgccggcggtgaacgggctcgccaaggacgtgccggcggtgaacgggatgaccaaggaggagcccgcctccgcgcctgccaggctgctcacgctgtccaccgtgcttactattggccgcgtcgct

SEQ ID NO: 458851 - DNA, 118 bp, Sorghum bicolor
cgtccgagacctcctcctcctcctcctcctccggcggctccgcgcccccctactacggcggcgcgccacccccttcccatccctcctacggcggcggagagcggctacggacgccacc

SEQ ID NO: 458852 - DNA, 385 bp, Sorghum bicolor
cgtccgagcgcagaaggaaggcttgaagttaacactgatgaacttctcttgtaaatggatgtgctccctaggtttgctcctttaggcagaggcgttggcgctgcaccttgtactattgagcgttaactcgaaatttcgtctgattggtctctattagttaggtgtggaagcaacatttgctatagctgtaatgttaggagtaacatgtgttcgttgtggtcagatccatgttgcattggcgctgagccttaagcggaatgaaccctatgctcgctgtgaggcccatggcatcgtgttgtcgggtggtgttgtagcttattgatgttctatttattataaccaatttaagcagtggattttgtagcaaatgcacctttttaactta

SEQ ID NO: 458853 - DNA, 491 bp, Sorghum bicolor
cgtccggaagggttcatacataaagttgacaaaggtggctcagatgttgagttattagaggatgctaggatcgtagctcctcaaggcatccaatggcatgtctttgctgcatttgggacactgaaaggcggacgtgctgattggcttatagagaaatgtactgaacttggagcttctagtgttacccctctcctgacagaaagatgtcacacgatagcggaaaatcgggtggacaggctgcaacgtcttgtgctggctgcagttaaacaatgccagaggatacatgaaatgtcgctgaagcccccaattcagattagtcaccttctacctgttgtatcacagtcaaagcttgctttcttagcatcagcagaagcgcctcctcttttaagtgttctgccaaaatccagcactgaacaaagtgggcttctgattgttggacctgaaggagacttcacagaagaggaggtacattcactgaaagcagcaggtgc

SEQ ID NO: 458854 - DNA, 86 bp, Sorghum bicolor
cgtgcggggaagctggcagttaacactgctcaacttctcttgtaaatggatgaacttcctctagtatgctcctatatatattaggc

SEQ ID NO: 458855 - DNA, 127 bp, Sorghum bicolor
cgtccgcccacgcgtccgcccacgcgtccgtcataatttagcaaacctattagtgatattaaaaacacacttcaagttcaggcgaaactagccgtcccctccctcccccccccaacccacccaccac

SEQ ID NO: 458856 - DNA, 331 bp, Sorghum bicolor
  unsure (1)..(331): unsure at all n locations
cgtccggcgaagcgggcggcggatggcgcgcgggctgcgcggcgtccgcgacgacctctccgagctggggcggcacctgctggacatcgcctgcttcctgcacccgctcctcaacccggcgcacaccgactcgccgccgccaaccccgacgggcccgggcccgcgccaccgccgcgcgcgccgctcaccgtccccgcacccgccgtcgtccccgtcgctcctcgcgggcatcctctccgacctcgccgagatcggcggctccttccgcggcggcttctctggcgcagccgttcgcgncccgttctcgccgccgccgcccgttgtggtcgag

SEQ ID NO: 458857 - DNA, 522 bp, Sorghum bicolor
cgtccgcgacccatctgatagcatggtttaatttgaacttttagtacgattttgtttttactttgtttatttacaacattgaatattatctagtgcatagtgataaaggaagtgtagaaagcctgaattttgtcttggtgattagcggattgcgtgtgatactgtgatatagagaaagaatgatgattcatgttgttgttaatactccatgttcatttcacatttaatatgatcttctttttgtaaaaaaaaaaaatgcatggatgttgtctgtactatatctacgctttacccaatgaattagtgatgcagtttctgataaatatttgttaataaatctgtatctgaactatttcttctattgaatgaagattcatacaacatcgagcaatccatttctgatattatttatttgccttctgagatgttcggagaggaaatctctgtaacataagaagggatttgtcttaacaatccacttttgcccttgaataggagggcatcatcctgaatgcacaaaca

SEQ ID NO: 458858 - DNA, 455 bp, Sorghum bicolor
cgtccgggcggacaccgtgggggcgcttcctccttccccgataccggagtgcgactccgggaggtcctcgccgtcccacgccgcgtcgcccgagttcgagttctggatggtgggcacgaacccgtccccggcgctgctcaccgccgacgagctcttctccggcggcgtcgtgctcccgctccacaacctccaggcgccggccgccacggacggcgacggcgcgcctgcccctcaggccgacgcagacgacgccgccgccaaggcggacttgaagggcgcggacgccgcggcgctcccgctgcctgaagcccatgcgcaggaggcggaaggggagaccgcgcatccgttcgcggagtccggcatcttgccgtgctcgcgtagcaactcccgaggggatgtcttcggtcctgtgccgtccattcccgtctccaccgcagtggcagctgtagctgcag

SEQ ID NO: 458859 - DNA, 403 bp, Sorghum bicolor
cgtccgcatcacgcaacccactgtgcagtctgcatagttggtcattgacaagttcttatcctgagccatcgtctcgttctattttgatggtaagtggggctgcaagcaataatgttgacagtgatgtagagagatctgtaacaaactgggaagaaactgaaggtaccagagaggatggggagcttccagttgtgattcctgctgaaaatgaaccaaatggttctacaattttgcaccctgaggtgtcacctgagattcggagccattctagaggcttatccctgatatcaaagagtgcaacaccatctaagctaagcatctcacagagttttgggagaaatgaagatgatcttgatctcttgatgtatagtgacaacgagttggaagaccaaccctgcatttt

SEQ ID NO: 458860 - DNA, 543 bp, Sorghum bicolor
cgtccggaacggctcccaaaggctccccccaatcatcggatttctaccccgcgcctccctccctctctctccgagttgccgtccatcgctcggtacgcccccccaatcgtcgccatgattgacggacagcccatggaggtggaggcgcccgtcctcgcgccccaacaggccgtctcgcccccagcggccacgctgtccaagaagacgctggcatcgaccccaaagtccagggccgcgaggaggaagacgctctgcgacatcaccaacctgagcaagcgcgagccggccgacgtgccggtgccggacgagtcagcgtgcccggcgcccgcgagcgcgggcggtgttgtggagtttgcgcagctagtaaagaagaacgaggaactcgtgaggctcctcgcggagagagacaagatcatacagttgaagcggggtagagattcagaagctgcgacatgccaactgggaacttgcccggaccaattcccatatgttgggcgagttaaccttgggaaaaacaacttgttagcgctgcagcatgagcct

SEQ ID NO: 458861 - DNA, 465 bp, Sorghum bicolor
  unsure (1)..(465): unsure at all n locations
cgtccgaagttactccattggacactgatctgaccagccaaaacgagttcaataacagcaacgaggaaggtctctttgacaaatttaaatttaggaaaggagtagggaggctctgcagacaccctgtattccagttcagtaggtccatgaagaagtccgatgaagcagagcaagcttgtgtatagggtatgcctgtgtagttgataacaccgccatttctgcaacttgtttactgtgtaggtcttcagctattctcctagattgtctgccctagaaagtattagcccctttattagtaccgatctgggtgtatatgttactatgtcagttggtcacttctcaccgtcctaattgttagaaaccatcatgcagatctactgtaagtgtagtgatcattattgatttgtcagatactcttgtatgattnttcaatttaccgtgaagaattgctgggtgcttaaatct

SEQ ID NO: 458862 - DNA, 539 bp, Sorghum bicolor
cgtccgggagaaacttagcaaggttcatcaggaaaagaaagaacaggaggaaacaaccaaaaatgctgaggcacacagacagagaattggctcacttgatgaatttctggctactaaggaagttagtcagaacagtgggaattctactgaagaagaaactagcgaggtagttgatccttcggtggatagcagcaccgaacataaggagaacacaccagaatgcagtgaccatactagtacggagaattttcagacatcaccccaagctacagaatcgggtggcgctggagagattcaatcaacacaaactgttcgcaaaggcgtgtcacagttaagggcaaagaaaaccagagatccggttgcagatccttcggtggatagcagcaccgaaaataaggagaacacaccagaacacagtgcgaatactagcacagagaattctcagacatcagccccacttacaggatcagaaggtggcgatgaggagaatcagtccacacaatctgttcgcaaaggggcgtcacggtcaagggcaaaga

SEQ ID NO: 458863 - DNA, 475 bp, Sorghum bicolor
cgtccgcccacgcgtccggtttggaagagatcctgctatttcccgtgtttacgaggcgcctctggaaatggcaggaacagagtcatctacaggaactagtttcacagactcttactctgtcagtgttttgagtaaaccaactattgaccagtctgcagatgttgatctgaaaccatcagcgccaccgcttgcatactcagaaggtgatggtttcatgcctcttccatctgcacctcttgcaccaaagatggaggttcctggatcaggaccagcacctggaactcgtgatatagatcaatcagcctttgactatacaacaaatagaaacaaggaacgtgatgctttgaaaagacaagatacacccatgcccattagaaaagatatcttggtaaaagatgagccaagagatggtcacagtgatgttccaatgcttccaaatccccgtttgatgtttcagaatggagggaatgcttca

SEQ ID NO: 458864 - DNA, 77 bp, Sorghum bicolor
cgtccgggaaaccctcaccacgcttctcgaaccttctcctttctgcacccggaacctcacttgcctcccccttcgca

SEQ ID NO: 458865 - DNA, 505 bp, Sorghum bicolor
  unsure (1)..(505): unsure at all n locations
cgtccgcccacgcgtccgaagtggtcatttctgagaagttccaccacaaaaaatcccagtggagactcattgtcttcataaaagacattgctttgttgtttccatgaaggcaaatcctatctaaacttgtcactgaattttgcatctttgcattttcatgactggccctgtagtgcatttttgtttgtcgattccccattttcagtctttccatcaccttaacatggtttcactatcgaagccatcactatacatatataaatactaaattaccctcatttccatcgtcagcaccaggtactatcttagcctacctcatgctgctttctgtatcttacctgccagtatctcagcatttgatagccttctcggacatgtcttgctagacttatacagagttagtggtgcaggggaccttactggtgtaccattatacctgattgagaacagcaaatcaaaataggcccacccctntgtcctgaaacccaaatccatgcttgtcatg

SEQ ID NO: 458866 - DNA, 485 bp, Sorghum bicolor
cgtccggtgaaggccgtcaagaaggagaagaaatgccccttcgccaccgtcaagatcgaggagatctccgatgacaatgatgctggatgcgtcgccatcaaaaaggcatttgctaagggcaacggcaagggaaagaggaaggagctctccccacaggatgctgcattgctcatccagatgacctacaaggctcatcttggtcaccgctcccaagtgcttcactggctgcgcgatctggctggggctaaagccaagctcaaggagctcaagttcctggtctataacatcttctacaggcaccggattgcacatgaccatgaagagcgccagaaggtctctgagaagaacattggactggtcattactggcgatgcgcgtgagggacctgactacatggtgaggaccgcgaagaaatctatgctcgaggagcttgaaacaatgctggaagatgtggaccctctacccccagggaagcacagatcact

SEQ ID NO: 458867 - DNA, 548 bp, Sorghum bicolor
cgtccgagctaatgctccggatttgctggattttgtgaatgatcttgagtttcacataacaactatctcaagcatgtcttgcgcccaagtagtggcaccttctacaatagcaatgggaacccctgggtttatggacttcagggtgctgcctctgtcgacactcttgacctacacttgccagaacacgagcgaggggccatcaattacactgaagtgcaatggctgccgaatccctccaagagaccactatgtatcctggcagtttgttgacctgccaaggcaaccggctgctgctattggcttccagtttaatttgactgcaaaggaacatggagatgataaagatatgagctttgtgagtggtactttaagctctgataattacgttgatgccaagctgaaaacattcagagggccagattccaatgtgctcaaaattcaattgtttcctcaaatatacaacaaccatcgtggcttgaagctcttgcagccgcttgtccaggacttcactcaagttctaccttatcagatttgagcagcttgaatgc

SEQ ID NO: 458868 - DNA, 476 bp, Sorghum bicolor
cgtccgcggacgcgtgggtccgcggtggtgcagttaccttcggtgagcagacgacgactacgacgacgacgacgacgctcagaggtttccccgttcccgacggcacgtccaccgaggcggcgccatcgcgatgggtcctctggcgctgaggtgtaataacccgccgccgccgttctccaagtcgccgggctccctgctgctgctctccaagtcgctcaccctctactgctgagctgagcccccctctctatctctctcggttcatgggcgccgtggcctcgtcggcggccggagggggccggggccggggaggcgatggcacggcgctgggcgacttgccggagaactgtgtcgcggaggtgctgctcaagctggacccgctggagatctgccggatggcgcggctcagaccgacgttccgtggcgccgcgttcggggacgggtctggagtccaagctgccgaggaactacgcgcg

SEQ ID NO: 458869 - DNA, 302 bp, Sorghum bicolor
  unsure (1)..(302): unsure at all n locations
gctgtaccgtccgggatcccggtcgaccccgcgtccgcggacgcgtgngaaaaaaaaaaaaaaaaaataaaaaaaaaaaaaaaaaaaaaatataaaaataaaaaaaaaaataaaaaaaaaatggggggggccgttttttgttttcaagcttatttcgtttgtttgtaacgttatagtttttttttgtggttgtgtaatttaaatttattggttgtggttttattttgtattgtttgggtaatgtgttttttgacctaacttaatagctttgcttacctttctacttttcttacctttggttt

SEQ ID NO: 458870 - DNA, 436 bp, Sorghum bicolor
cgtccgggcagattcggtgaatgcaaatgggaccttaaattcagagagcaaatgtgccatggatcaagaacttaagaatgccatattgaagattcaggactttgtcaagttacttgatcaagaagtctccaagtttcaaggccagtcatctgattatgatgggctatgtgagaaaacacgacagttttctgcattagttgacaaagttctgtcaaacggtgatgtcctaaatgatattgtcatggcactgtctgttatattgtcagaaactagccagattaagttcacaatgttgagagacaatagcaatgaagcagaaagtaataacttagattgtgttgataaagtgactctacttgaaaataaggtgcagcccgagccagtaaaagacaatgtatctggtctcttgccactggtgcctcattcatcttctgat

SEQ ID NO: 458871 - DNA, 544 bp, Sorghum bicolor
cgtccgcccacgcgtccggcagcagctgctttatccaacatgggcaacttcctcactgaaatgagcagtgattcttaccagcttcttgggatggctgagcgtggcatgctccctgacttttttgccaagagatctcaccatggaaccccgcttatcggcatccttttctctgcctttggtgtgatcctactatcctggatgagcttccaggaaatcattgccgctgagaactacctctactgctttggcatgatcctggagttcattgccttcatcaagcttcgggtgacccatccgaacgcctctcggccctacaagatacctctgggcaccattggtgctgtcctgatgatcatcccaccagctgtcttgatcatcgtggtgatggccatcgcatcctacaaggtaatggcggtgagcatcttagcgatggtcattgggttcgtgctgcagccatgcctatgggacgtggagaaaaagcgatggctaaaggtctccatcagtgcagacctgcccgatttgcctgatgcacaggaaactgctg

SEQ ID NO: 458872 - DNA, 514 bp, Sorghum bicolor
cgtccgcggacgcgtgggatcgccatttgttttgagagaactagatcaacctgttgatactttgaagcatgttggcattagtggtccaatggtagagaacatagagacaaggctaaaggaggatatactctctgaaattaaacaactaggtggccggttactgcttcataaagaagaatttaatgcagccacaaatcaatgtagtgtggtaggttactgggaacacatagatctggaggacgtgatgacaccagctgaagtctacagcacattgagagacaagggctattgtatcgactacaaaagaatacctttaaccagggaaagagaagcattggctgctgatgtagatgctatacaatcattaatcgaagaatctgctaggtactatctctttatttcacacaccggataatggtgtgttgcttatgcaatggccattacctgccttggactgggtgcagatgcaaagtttgtaatggaagaaacagcagaaacacactttgtatcaaca

SEQ ID NO: 458873 - DNA, 260 bp, Sorghum bicolor
cgtccgaccgtcgacgagtacctgaaccgcttcctctgaagtctgaaaaaacaggacgacgatgtgtgatgtggacgtcccaatcgtgatgatgagttcgtcagctgctactgctagtcactagcgacgacgtgtgtctgatggatctagcgtgcctactttttgttgctttgagggatctagcgtgcctgcttgttgtaatggcctcaccttttcctcgattctacgccaatataataagaacccggcttccttcaaaa

SEQ ID NO: 458874 - DNA, 145 bp, Sorghum bicolor
cgtccgaaaaaaaaaaaaaaaaaaaaaataataaaaaaaaaaaaaaaaaaaaaaaaaaaaaaaaaaaaaaaaaaaaaaaaaaagggaaaaaaaaaaaaaaatggggcggccgttataaaaaaatccgggccgcccgttttaaaga

SEQ ID NO: 458875 - DNA, 512 bp, Sorghum bicolor
cgtccgaggagggagaggccgtggtggctactatggaggtgggaggcgtggtggctacggttatgattatggctatggcgggagaggcgggtactatgaagagcaagatgaatactacgatgagcccgaagaatatgcccctccccctggccgtgggcgtggcagaggaagaagggggatgccttggcgcgggcgtggtgggcgtgggccgccgcgcggcggccgaggaggctactactagacaagagatgcgacgtgccaaatgggtgtgctgaagctagcaatggcgtgcctagttatctgttagcgtttgctctgtgctcttctatggagctccgacccccggactggaattatcccgtaggcctttccaggtgctactttacttcagctgctgtgcctgtgcaactcgtctgggcaagtttgtggctcgctcgggtttgtagctaggtaacgagtgagtacactcgtagcgcaggttctcatcggcgatatgcagatgttatctgtgt

SEQ ID NO: 458876 - DNA, 536 bp, Sorghum bicolor
  unsure (1)..(536): unsure at all n locations
cgtccgcggacgcgtgggctaggacgatgacgtcgagaatgtacgtggatgcatgaagccgatggatctgctgcacccagtgttcgcagaacatcgacctccccgatagaagcaccagccgggcgctgtgtaggtctgtaggaatactcccacgacacctcgcgcgaggccttgcagcagagccacgccaccggcaccatggccgctcaccgagatctccctgcaggtgccagtgggaggagggcactgccgtgggagtggggatgagcgcctcggtcatcagcatatgagagcgatttgaaatgtcctgaagagagagagcagcggacagagaaagcaggggctgggttcattattttagttttagatcccgtccaggctgacatgggatggatggtacactcagctggttgggttcgaccatgtaattgcactttgttctggggctttcactaactattgggagccctaagctcctaatagtgtgtgtgtgtgtaggtcataatatgtcgactaggtatntatatcactcatgc

SEQ ID NO: 458877 - DNA, 514 bp, Sorghum bicolor
cgtccgcccacgccgccgccgcggcacccagcggcgcatcctccctatccgtgccggcgctgctccatccccatgcgcttcctgctctgcgcctcacctagtcctccccacgcatcatctcctccgtcatagcctcactcactcatcaccgccgccgccttcctgttcacctcctccgttcgtgtctgtgccgccaaaccttgtcgcgtccactgccggcggcgcccccccgcatcccaacctgctcgcgccctaggctaggatggttggatccgcgaccccgccgccgtattctccacagggtgaacctagaggcggatccaggcgagcgccgtccccatctttgggggactggggattttctgatttgaggcgacgcaacagcgacctggaggcaagacaagatatggttttggcagggttgggcctcttgcacatccggcatctcagcgtactgggtcatcccatgctggaaatgctgcttctggttctcctgagcaatgacttcaaagag

SEQ ID NO: 458878 - DNA, 492 bp, Sorghum bicolor
  unsure (1)..(492): unsure at all n locations
cgtccggaatgtttgaacaacaaacagctggtagttctctaaaaaatgtgatcttgcaggtttcctgctcctggcaaggcctccaagatggggaatcttgatacctcattatttccacaaatcaataagactgttcagcagcaaagtgaagtcgatgagaagcttgcatcgatactctacgaagctttacttaccctcagacgacagataatggaggagtgtagtgaaggatgccatgcgtaccacatattcaagtaagttgttattgcaccttcatttgtggaagcattcactggctcctgatacggttgagctttccatcttcaggactgacacgttgaaggagatgagcatncgagtaccaagaacaaaagaagagcttttggatataaacggcatcggcaagacaaagctcaagaagtacggggaccgtgtgctngcaaccatcgaggacttcctgagcaaacacccaaatccaaggagaaacatcag

SEQ ID NO: 458879 - DNA, 280 bp, Sorghum bicolor
cgtccgaaacaaactttcccatccatatcggatcggatcagcactagcttgtagctagcaagccatccctagtccgccatggcaaagctctggtcttggctcaccaccgcgaggtatccgacgccagctgtgtcctgaccgtactcggcgagctgatcctaaccttactattcgccttcgccggcgtcggctgacccatggcatcaaggaagctggccggcagcagcggcgacacggtggtgggactgacggcggtggcactggcgcacacgctggtggt

SEQ ID NO: 458880 - DNA, 469 bp, Sorghum bicolor
cgtccgcccacgcgtccgggtgcattaaccccaaaggagagcacaccaagagaaggaaaagaggttgaaaattcttttgctgagggtggtttgccctcaaaactaaaaccaaagatggcactcgatgtaaatgagatccttctagttaaaaagaaaagtgttctaggaaaggatggacctaaggagaagaaacagggtgcaaggggggatactcttgtatgtggagcctgtggtcaggttgggcatatgcggactaacaaactgtgccccaagtatggggaggatccagaaatgtcagaaatggatgctaattcagttaagcccaaccctacggatataaaccatttgcaagcaaagatacctaaaagattaataacaaaagtttcctctgaagttactgaaactgaagggccagaaggtatcgaaaagacaaatctgtcccagtaaaatttaaagtaggggcaccgga

SEQ ID NO: 458881 - DNA, 468 bp, Sorghum bicolor
cgtccgctcacgcgtgcgatgatgcgggataccatagtgctagtattaaagatggtcaaaaacatggtacgaaacattacattgtacaagacaccatattattgaccactctaatgctaatgcttattattgcgaatgttaatgctactcctcattctacaacaatgacttgtttcatgagcttatgacttattgagttatataaggtgatgaaccatgctgattaccatgcttgaactttggcctacctctgatctgtacactgaactattaaacatcccacttcacaacctaataaagacctaagatttggtttaagactgtgtgtataactgtatgtattaaccttaagaacatactcaccatcatgtagaccatgctggcctttgcgcttaccaatgcctcacctcgggttacacataactatttcctatactgattcacatggcgtgcgtgttagccagcatg

SEQ ID NO: 458882 - DNA, 441 bp, Sorghum bicolor
cgtccggttttagttaagaatacattccagcaacattttgcccacagttttcctcaccatggtctctgcaacaatccacacaactcccgactaagaagtttgaagctggcagcctgctacattccaccattgaagggcttccatgcgctcaccagcctggtcttgcaagatttaccagagtccactccaaccgcagcctatgaagctattttcaccttgtgcccgcagctacaagcactgcacctcaagtcctgcacactgaaccaaggtgttgtggccgtacacgcccccaaatcacagatcaagcaacttatcatggagcattgctggtttgggctgattaagctgtacactctgccaatgctcgagagcatggctgttctgcaaagtaatgtgagttatgagcttagctccttcccatacctcacacacttgaatatc

SEQ ID NO: 458883 - DNA, 513 bp, Sorghum bicolor
cgtccggccccgctgtgtctgcgagtgcgcatccttcgtccccttccagccgccgtctccctcgcccggtcgacggcgaaactggggtccacggagctggcgcgtccaactccgacccacgaagacctccgtcgacggcggcgaaaatagggccgactcctagaggtttcacttcacaggttcatcaaacaccagttgtggagacagcgccgccgcttccaatcgccggtgctctgtgccctgcggagcccccaccgcggaaaccggttggtgcgcgtgcgtggagcggaggccatggcggcggcgaaggtcaaatcggtcgccctctccgtcacccacaagtgccggaacatcttggctgccggttgggaagcccacctcaacactgtcaaggccgatgccaagggaagccatagtgagaattactcgtcgagggtgcactaacatgatccagaagggcacgccctaccctgattgtcctgagaacgacatgcacaacattaacattataat

SEQ ID NO: 458884 - DNA, 397 bp, Sorghum bicolor
cgtccgtcgacccacgcgtccgtgtaaaaatcataatcaggtggtaagcattgtgtttcctgttgagttttggatcaacaggaaataaaatgctggaaggaggatctgatcacgtgttgggcggtttcaggtggtcctctgagcaaggtaaataaatggtcctatctgaggcgcttcaagcctagctctcataatgttgttacgctatgtatgtaaatgtctcttatagtgtgaatgtcaggcgcccggattcatcagtctattttattgttcaattccttaagatgttccattttgagttgctgaatcttgggacaacaaagatgtgagactggtaggactttatttggaaaactggaattcgagcatgtagaatttttaaatcggtttattggac

SEQ ID NO: 458885 - DNA, 527 bp, Sorghum bicolor
cgtacggatccacaaaagcatcttccgccgccgcccgactatattcgtccgctccgcactccgatctcctcccaacttcgacccggcggggatggatccggcgccgcagacgcacccgattctttcctacgtgctctcccgcatccccacccttgttaagtccaacaagggctccactaccttcgagttcgacatcgagcagccgtcgcccgtgcacaccccgtacccgcggacggtgccgatgttcccgttcgcgggggagttcgagctcgtctagcgcatgccggggctgcgccacccgttcgtgcttcgcgccatgacgcgcgccggcttcgacgtcttcgccgcgcgcgccgcgcttcaggtgctcgggccgcgccccgaccacgagctcgtcgactcctaccgcgccatcgtcgtcgccgccgaggccggggacgcgcggatccccgaaggggacgccgaggcctgccccgcggggtgcgcctggagcagacccacgacgcctactaggcactgctgcacga

SEQ ID NO: 458886 - DNA, 119 bp, Sorghum bicolor
  unsure (1)..(119): unsure at all n locations
cgtgcgttcccgttttaccccgtccactcgtcgtgtgaaagtgaaactgtttatgggcatatcaattatttgttaaaaataaaaagaggggggcacccacatttccnnntttttttttt

SEQ ID NO: 458887 - DNA, 192 bp, Sorghum bicolor
  unsure (1)..(192): unsure at all n locations
cgcgtccggctatgcgttcgttagcatatttaagttaatcacgagaaacaaaaagttccaatttatttttttttttttttattgattaatagggagtagagggaaaaaattacatttctctctgtagaaaaaaataaaaaagaaaaaagtgtntcatttttttttttttatttatttcaaatttaaattgga

SEQ ID NO: 458888 - DNA, 477 bp, Sorghum bicolor
cgtccggaaggttctcgctgaatttaaggagggaattgaggtaaaaggaaaaatggtcagggtatctgcttgtcaagataataataccatttacctgggcaacatttgcaagggctggaccagagatcaggtgctgaacaccctaaaaagtattggaattcaagagtgcaagataacctttcccacttacaaggggggaagcagagggtttgcttttcttaagtttgcctctcactactatgctagagaagcattttgtcgcttaatgaaatctgatgctgtttttggtactgatagaagagctaaagtatctttttctgaaacccccacaaaatcatccaagagtcttttggaggcaaaaaaagtatacctggaacatgtccctgtttcttgggatgagaataagattaaagaatactgtgaagaatatggggagattctgaacagtgatcttttccagatattaaagaatttgga

SEQ ID NO: 458889 - DNA, 149 bp, Sorghum bicolor
gtccgattcccggtcgcccacgcgtcggttgcagaaaacccccgcaggagctgtgtcaagatgtgacacagataggggcctgttctggggcttgttttttttttttttgtgggggcaaccattttttttttttgttatttttttttaaa

SEQ ID NO: 458890 - DNA, 469 bp, Sorghum bicolor
cgtccgcggacgcgtgggctcatgctagaacaaagggttctacaagggttaggctgcacagagaattggctgcattgctggaagaggagctctctcgcaggggaacttcagtgataccagcgggcgaacaatttgggaaatggaaagggctgcgagaaagcactgatcgggagatagtgtggccaccaatggttattgttatgaacaccttcttggaaaaagatgacgatgataagtggaagggaatggggaaccaagagctccttgattattttggagaatatgcagcaactaaagcacgtcatgcctatggtccctctgggcaccgtggtatgagcgtgttaatatttgaaagctcagctgtgggctacatggaagctgaacgtctgcataggcactttgttaatcaaggtaaagacaggaatgcatggcagctcaacaaggttcgattcgtacctggtgggaaaag

SEQ ID NO: 458891 - DNA, 441 bp, Sorghum bicolor
  unsure (1)..(441): unsure at all n locations
cgtccggccgccgccgccgccgtgttccgtcccgtcgccgatggcttccgccaaggtggagaaccgaggcgcgctgtcgaaaaggtcgcgcaacgacgtgtctgtaagggagggggactggaattgtcctcagtgtggtaatgtcaacttcagttttagaaatgtttgcaaccgtggagcctgtggtgcaccccgtccatcaccgagtccaagtcctagaatgatgccagcacctcctcctggtggatatgaccggtcacctctattttacggaggagggtggggcncccacctccaattcctcttggatctggtagctatggtgctccatatccgcaccttgggatgcgatatggatatgtgccaccaagaggagctcctggttcatatggccttttctcgtcatatggtcaacctgggccaatgagcggtatgggatat

SEQ ID NO: 458892 - DNA, 381 bp, Sorghum bicolor
cgtccggtgaccccgcacgcgccgtcccaccggcgagcaggccggcctcgcggactcgtttaaccgagctacgctggctgaaaggaccggcaccgacttatctgaatgggacggatactgacatcgtacatagtgacatcgtgtcaacatcagcttacaaaatattcgcaaaaactgaacttaatgtgaagtgttactatcatcaaatcctgggaacttcatgatgccaatggtctgatgtggaagatatgacaatgatatttgtaaaaacgcatgatgaagggctctggcttgtgtcatggattgttttctgcaaagacattgttaaagtgcttattctttacagataagctggatgatgtttcatacttatcaaactga

SEQ ID NO: 458893 - DNA, 489 bp, Sorghum bicolor
cgtccggattggcactacgtattaaagtcaggatattgacgaaggcactatctgttaccttgcagcagaccgggtgatctccattattggcaacctgcaatttgtatccatgtcttaataacttgagatttgagaataccacccacttgatgatagtctgagagcacatatacatgttttggatgattcgtaggttcaaagctggacaccaagggtcaccacctagaacccagatgcattatagattacatctcattcagccttgtcgacaagaagtaccatatcaatgcaacaacagcagaaccaaaccaacgatgatgaaatgatagaacctcacttgaaaacaaacataaccagattgatgaactactgcttgtcattcaaagcgaggcttcaaactatccatgtacagtagtggccgacgttccaaagtgtcagctaatgtaacctacaccgttaagcttcagctcgccatggaaagacctacag

SEQ ID NO: 458894 - DNA, 413 bp, Sorghum bicolor
cgtccgagcagcctttgctctaagtataacaagagcaaattctttcctgaagatggctttacacctctgaactgaaggctgaatgcctctgaagattaaatcattcctgatagaccaaatactccaactcatggtgattaaaatttccaaagcaaaagggcagtgaagttgagctttaaacatgaccactgtgagaaaaggatcttgcagatgaggcactatcagacccaaagttgcccaacatgcctgagcaaaggggcagtcaaggaacaaatgagtaacagactcctcagttggcatggaagtacaaaaaacacaatgataatcatccaagaacaatatttctccgttcaatatctacgtggtgcttaacctgtctcgtaataggagcccaaaagaaaatcttttttttt

SEQ ID NO: 458895 - DNA, 126 bp, Sorghum bicolor
taagcagacaagaaaaaagaggactcaagagaagttcgagggcctctgcaaggtgatctaagaggtgctgggcgacaaggtggaaaaggtggtggtctctgaaccgcgtggtggaactccccctgc

SEQ ID NO: 458896 - DNA, 156 bp, Sorghum bicolor
ccggtcgaccacgcgttcgccacgcgtgcgatggcagaggcagatggtatcattatgccaagaggaaacctaagaattgaccttccaccagataaggactatgtgcagggaaggtttgcgcttaacaagtgcaacatggctgcaaagcctattgat

SEQ ID NO: 458897 - DNA, 462 bp, Sorghum bicolor
  unsure (1)..(462): unsure at all n locations
cgtccgcctccctccttcgaaacctagggcaccaccgcagcacctcaacacgcagtccacgccgccgccgccgtagcgccgcagtccatgcagctcctccacacggctgcatccgatgcatccacccatcccactgccacacctccactccgccgcatccacgaatccgcactggttcaatgtggtaaactgattatccgcatccacggatccgccgcatccaccgccacacctccccctctcctcacctcccctgctgcccgcggccccgcgccggagcaggtggtggcagcggcggcggggctgcgaccatcttcgctgtgactcatccgggctacgacccacttcaaggtgttgctagttacatccgttggagttgcggcttccgccgaatcccccaatccacacccgccatggcgttcttggggggtggagtgaagcctangaagccctatacccaca

SEQ ID NO: 458898 - DNA, 352 bp, Sorghum bicolor
  unsure (1)..(352): unsure at all n locations
cgtccgggttcttcatgtatgatttatcctacttcttaaactttaacagattatattttttctctcacatctcacataggtagtgttattagcaagctttgattgttattagcagagaagggagggagacggtgaaagcagggagtatcttgcagccagcagcatgagtgaggtgccgtgcaggtgcgacagataacanataatggtgctgtgaagatcagtttcaattgtttataatgccattcagaaagttccatcgcctatcaatgtgttcaccctcaatgactcangcaaattgatagagcacatgcangcaggcgatgcattcttnctcagcatgtgatcatcagta

SEQ ID NO: 458899 - DNA, 359 bp, Sorghum bicolor
cgtccgatgactcgtacggtgtgctgctgaatgcgacgacaagattgacaggtatagcatcctagactggtacaagggcctaactgtgcgaggggctgtagcctagagaaaagaaccaaagatgccttcatgacggtccaaacagtttgccacataatgaggcgagctaataaaggtggaatacgaactggttctggtgcacgagctgagactgggatcatataacttggtatgagcggtacagttcgtgctagcggtatgactgctgtggtgaaggctaatgatacgcacgatcatgatctgtaacaggtgatcacttaacacaatgaacactacaatgataagagacatgctgagat

SEQ ID NO: 458900 - DNA, 175 bp, Sorghum bicolor
gcgtccgtaacaatgggtcacaaggtttgggagaggagacggcaatggcggaggcggcggaatgctcagtcattcatccaccgtggagaagctctacgcatgggagaagaagctgtttcttgaggtcaagagttacgagggggtataagcaggagcatgattaagaaggtgagtc

SEQ ID NO: 458901 - DNA, 133 bp, Sorghum bicolor
cgtcgcgcgtccacgaaaatggctgcgctcgcgacgctcctccgccacggccgccgcacccacgcccacggccgccgcctctccagtgcgctctccaccaccaccggcggcaccgaccccggcgccacgccgt

SEQ ID NO: 458902 - DNA, 427 bp, Sorghum bicolor
ggcaggtcgacccggcgtcccgtcgccggatacgaaaatggctgcgctcgcgacgctcctccgccacgggcgccgcacccacgctcacggccgccgcctttccagtgcgctctccaccaccaccggcggcaccgacccaggcgccacgccgttctcggacgccaagcggcaactccgacgagagcgcgatccggaccgagtggtcttcatcctcgacgccatcgacacggcgttcatatccgctgccttcacccggcacgcgctctccctggcggagcgccggctttccctctcccgccgattcgctgaagcggatgccctactctcctaccatctcaccgtgtcaaacaccgagacccacctggccgtcgttctgtgctgctacgccgccgccaaccttctcgagaaggccatcgacgcctttcgc

SEQ ID NO: 458903 - DNA, 78 bp, Sorghum bicolor
ctggtacgggcccgaccgcgtcaagtacctcggccccttcttcgcgagcccccgagctacctcaccggcgagttcccc

SEQ ID NO: 458904 - DNA, 133 bp, Sorghum bicolor
cgtccgcaccactacaccatcaacagctcaccaccccccactgctcttctgtcctgcaatggctgctccacgcctcgccctggtggtcgcgacgacggtggcggtcctggcggcgctgctgctggcgtcctcg

SEQ ID NO: 458905 - DNA, 309 bp, Sorghum bicolor
cgtccggtggatctcgccatcctcatcgtcctcgtcatggatctcgccgctcccgtcgtcctcaccatggatctcgctactctgctcccgccctttggtagcacaggctcagtgcctccctccggtcacgtgggcctgcctcagctccatcgtgtgggctcgatccccgctgctccaccggcacgctactccgccgagcgcttgtctccctgtgtgttgctctccctcgcccaacgttggccacatcttcttcctccatgaagccgaccaggctgcgcggacctacagctctagcgaagcgggctccct

SEQ ID NO: 458906 - DNA, 209 bp, Sorghum bicolor
cgtccggtggcaagtcattgcattgtgagcatgtggaagtgactatgccttgttagatggccgctgaccattctctgcactgatgcagtgtgatatgttcggtcgagtaccctggcatattagtgtgttgcgtgcgctattgaggatgatacatggcctggttggatgacatccgaaatccaaaaactcgctatgacatcgaatcctgc

SEQ ID NO: 458907 - DNA, 204 bp, Sorghum bicolor
cgtccgcatatatacctgtaggttgcaatgtagaattatgcagtatggatggcgaacctgtgatgctgtgtctgaggcggtgaacctcgttagttaggagaattgagatagtagcagtgtgttgctaaaaaaaaaaacaacacaaacgcaaaaccaaaagccaaaaaaacacgaaaaaacacaaaaggccggccgctctaaagg

SEQ ID NO: 458908 - DNA, 229 bp, Sorghum bicolor
  unsure (1)..(229): unsure at all n locations
aacgtctgtctcgaggaacatgttcgtcccaaagaaagatgatagagacattggaaattaagcttgcagctgccaatgaaaagttaaagaggtctgatatgacggcctcagaaaccatgactgagtatgagaacatgaaagaaaatgtggagagtgctctgtcacgcccttgagaggctgagcaaacaattctggatggaggagaagtacnnngaaaagtacataacac

SEQ ID NO: 458909 - DNA, 145 bp, Sorghum bicolor
cgtccgctcttttctcactgctctctgctgcagtgctcagtgccagtaccaccagcggtgcttcttcttgtcctcttcccgacggccgctgtccctgctgctgctggagagcgagagccaaactagctgggggtggtcggtaggt

SEQ ID NO: 458910 - DNA, 329 bp, Sorghum bicolor
cgtccgggctcccattccatttccgcgaggagacgaggaggggagggaggcacgacgccgccgccgccgccgccgtttccgcttcgacttcggcttcggtttccacgagagttctagcaaaagtcttctggactgttcattttcctgcattttggtatggacgaatcctcctgtagatccactactcccagtggggtttcttagaagaggttctggcatttccttgagaaatcaaagcaacgaggataggccaagccaatacaacaagcagcccaggaagagttcaaatctcaatccttgtaaatcacggggtcactgaaataaagaga

SEQ ID NO: 458911 - DNA, 369 bp, Sorghum bicolor
cgtccggctcccagacgactgttgtgccgccgccgccgccgccgcagcactaggccaggtgctgaggctttccttggtctcttcgccggcgacgagcacccaccagggcatgaaaatgtcagcaagtgctttgaaagatctcaatgtttctcaatcagcaaacctggagaatggaaaagacaattctgtgaaatcctgcattagcaagcctgtgttaaatggcaacagttgtgccaaaaaggaagaaagttctctgtctgcttgccctgatgcagtgacgaatggaaatgtggctggaaatgcagacgtggagtacattgattctgagaatttagtagatctaccagatgttgatgcagctctaagtac

SEQ ID NO: 458912 - DNA, 519 bp, Sorghum bicolor
cgtccgcttgtgcaggcactaaaagaactcaggagaacccctgagatgtttgttcagcttaagaggatgtttggttcagtggcatcagtacctgctagggttttccttacaggagctacaattcaaatggcagcaggatcggtatctgacctcaaaccaaactttgaggagtaccttgctaattggagatatacaaatgatgaggtttttgttttggatggagggcatggcagtgcttcaaatggttttgttgttacatctgttatgtcaactgggcagtattttcaggtggcagaattgtatacagtaacattcctctgtattgtctctcaagatagtgaaactgctatctcatgggctgaaaaagctgatctgactgagcaaagccgacaggatctacttaaaaagcttcatgcagtacgattagctgcaaataaaaagctgtcggctgttgaaggggaaaacaaacagcagagaagaacctttctacttctacaaatggctcaacaccattgccac

SEQ ID NO: 458913 - DNA, 347 bp, Sorghum bicolor
  unsure (1)..(347): unsure at all n locations
cgtccggtgttgcgtggcctgaggctgagtgagaggttgtcctcaacgcaaaggcaaaggcaaagccagcccagcagccagcgccttcacccatcctcctggctcctgccgtgctgccaggagcttagcatctgccgccgggtatgccattcccgatcccgtcctgattgatccagcagctagcgcggcggaggccccgcagaaatggacggtgcctcgtcctcagccggcggcggcagcggtgcttcttcttcttcgtcgccggcagcggtgcangggagccggggcggccgggagctcgccggggagggtgggcgcgaccaacatcggcaggctgcggcacggga

SEQ ID NO: 458914 - DNA, 221 bp, Sorghum bicolor
cgtccggcacacgcgtacgggacagggtaagcagccaccctagcgggacccctggatccgcagccgtgtgtgtagccttggttatcgacgtggggaccggggggaggaacaggaagaccatcagctccgggcctaattccgtcaagttctacttcaggctctccggtaacctgtaccggtggccgattaggaggtccaagactaccttcatcgctgggttc

SEQ ID NO: 458915 - DNA, 135 bp, Sorghum bicolor
  unsure (1)..(135): unsure at all n locations
cgtccggtgacagaagcgattctgtgtttggaagggaaagtaacagtggtgatggtgcaaaatggggtggtggaggtaattggaacgctacanatccaccaagtaaccagccttggagtagtagtggaggcacca

SEQ ID NO: 458916 - DNA, 394 bp, Sorghum bicolor
cgtccgccgacgcgtacgacgaagtgcaccacgaactctgcgtccttcgctccgtgcctcccgcgctgtctcgcgcgccgtctctccgcggctccttgcggcagtgctggccgcaacacgcggatgcagacgctccaggctccgtcccaggctcagcggatgcgtcagcggatgcttgtcaaggctgttgacatagctgctgaactagccactgtatggacggtggttactgagggctcgaaggaacacctggcggcacatctggatgcaactctgcattcagcgctgggatacagaagctgtcagagaagcgctgtgactcgtgtgcagaaacttgtggcaccgctgggggcaaagctgcgccagaaggtacagccagggagacatctgcaga

SEQ ID NO: 458917 - DNA, 218 bp, Sorghum bicolor
tagcgccggcgcctccacttcgcttcctcaccccatctccgctcagggtccggcggcggcgaagggaagggcaagatgtacaccgcgaggaagaagaccagaagagagggcctgagccctccgagtcgagactcgtaggaggctcttgcctggacgacagactagacgctagccgcatacatgttcaagtggcgagcgagggacatctcgtgcagcta

SEQ ID NO: 458918 - DNA, 422 bp, Sorghum bicolor
  unsure (1)..(422): unsure at all n locations
cgtccgggcggtgtaccagcagttcgacccggccaagtacagccccttggcaacacccagcacaagacccggcgggcggcaagttcgatggtcacaacgtcagcagcggcggcgctgctgcgggcttctaatccggcgggacctgccggattcctgcttcgacctcgcccgtagcgcgctggaggacgagttcagcgtcgacttccctagctgacgctccgcgccgagagtcgtgatcacatgtngtacgtcgagtcaacatactgaactgaagaacacacagatcctcatcatatatatactctagagcaacattaccacaagaatctgagcatttgctgatgtctgtattttcttttgtatcagcgatctattgacgcacatgtataatgtggtgaaaaaaaaaaaaaaggcgttagtca

SEQ ID NO: 458919 - DNA, 391 bp, Sorghum bicolor
cgtccgcgctgagattgcttttgcggatgctattaaagcatttcaagaggtctttgaccacacaaatgttatactgatcaactgtaacttaggtcatggtaggagagctttagcagaggaatgtgtatccaggattgatgaatttcagaagcatgatcttcctgaaggcacatatatgcaatccttcaagtcagccaagtcagaatattttcaagcaataaactactacaccgcagctaagaggcaactgaagtatgtcaatactgaagtcgataaagtactataccatgaggtttacacacagtatgcccatacctacctgaggcttggaatgcttttggcaagggaaagcttcttaactgatagttatgaaggcggacttgtcgatgac

SEQ ID NO: 458920 - DNA, 426 bp, Sorghum bicolor
cgtccggtggggcttatcatctattccacacttcctgccttttgcactggactatattgtgccaatatgagatgctgaatgaccaaatagctagcaaggggaagagcaatcgaggaaggaaggcaaagaatgcacctaagaaaagcaaaataacatccatagtgtgcccagaatgtcagggtactggaattcacgtcaacggagaagaacttgagaagccaagcatttctttatccgagatgtttcgctttaagatgaaagccattgaagctcacaaagcatggctgaagagtcctgaagtgcttgaaaactgttccactgggcttcatttcccctcagaacatgtggagaactctgaggaaaaggtgatgccactgaagtcgcttgctttctatgcctctgatgggtagggagatgggaagctca

SEQ ID NO: 458921 - DNA, 327 bp, Sorghum bicolor
actgacagcaccacgaggacgaggacgacacaccaccaagcgacgacaacaaccaagggggcgctctgaagctcatccttggcagggaacctgagagggacaagctgagggtgaatctgagctgccgtctagtatgcccaagccagaggcatttggatccttccaagaaaaatattaggtcccatgtatatcaccgaggctccaattgctcggctagacctctccttacgacgaaaggtgatatacacatcaacaggttatgtgatgaatgactcactgaccgcgaaatgcacaatcaccgcgctaggaggagatgaggagcatccc

SEQ ID NO: 458922 - DNA, 388 bp, Sorghum bicolor
cgtccgcccacgcgtccgcccacgcgtccgggaaagtaatcaaccaagacatcaagccagagcttgattctttctcagagaagtggtcatttttactcagaacaatgaacttttcacaacaagaagttgatttagccttcaagcaactaggtgatgaagcgccattagaacagctcgtggacttcattgtcaatgctcaatcaggagtatcgtctggaggaccggaaaatggtgatgctacaaatgaggggaagactgaattactctatggtgtgatggaaaaaacacttagcttgcttcagatgggctttaccgaggaagaggtatcatcagtgcttgagaattctgaccagagagcaactattcaggagctggctgactcaatttt

SEQ ID NO: 458923 - DNA, 577 bp, Sorghum bicolor
acgtccggcagcggagccttcttcatacaatacaacaactccagcaagaattagctgagacaagggcgtctggagcacaaaaagatggcccacaagtttctcgggaggggtcagctgaatcatcacatgttcaaagcatagcaaacagcgtcgcttcaaatggtagtgcaactgcagatgggaaccagcaattgttgaaaaataatggaagtgtggatgtctctgttaagggcaataatgcgtcagctgtacctgttccatctctactgggaataggtggtccggctgcacatattgctgcgatgcattcttttatgattcatcctcaaggcattcctcaacctttagcatcacccaactctggtgttcctcaatttggcagttttcagtcacagtctatgattcaaccaaactcgcactggtcaaatcagcaggaagtacaaaatgtctctcaaccgcaagctgaaacaaactatcagacatcccaatcagaccagactgcattacaacaaggctctattaatacttgatgatctgtcctcgaagccaagtcagggtatccatccagatcatcata

SEQ ID NO: 458924 - DNA, 389 bp, Sorghum bicolor
  unsure (1)..(389): unsure at all n locations
cgtccgcaacttatcaggcaggtggagcaagatgttgagactgtaatccacgttctccagccaggtccaatagggattgtggagcacaaattcacagatgcggagatcttggaggccaggggcacagtgaaaagagcagtcgataattggcgaagaaattggacccttgagagaaatcttggcagcacgacttttgataaatggaaataatatactagtgtcttctagcaacagcacttgaaataatagggtgccatggctggngtgcagctgtgctatttatttttagttagaattgagcacgatctgcttatcgggagtatgtaaactgttctaaatgatcagctgttcactttattcatggcttgaaggtcatattagagaatgag

SEQ ID NO: 458925 - DNA, 267 bp, Sorghum bicolor
cgtccgactcctcgttcgaacgaactcgggtccgattcggcaggttcattgtgaagttgaggtgagtataggtatcaaagagagcatgagcactgtcagtggtacaaggcgtgcaccaaggagacagtcgcaagatgggtcagctgataaagtattggtgataatcgaggcaagctcccgggtggcggggagccgtcgtggaccacccaacccttgttcctggcgcacgaaactcacccattgatgtggaggccatcgacgatgaag

SEQ ID NO: 458926 - DNA, 363 bp, Sorghum bicolor
  unsure (1)..(363): unsure at all n locations
cgtccgcctacccgcgcctcccgccgccgaaggattgccgagaggatccggngagaaatcggaactcgttttagatcggatcggngggactcgtggaattgcagggaaaggatttgaggatggatttcgagctgcggcaggcgcgggagaagctggagcgcgagcagagggagcggatgcagcgcgccaaggccaaggccgagcgcgagcgccgggccaaggccgaggcggcgcgcccgcggaagcgctcgaggcgtcccatcgcgagcgacgactcgacgccgnacgcgcccaggaagaggctgaccaaaaaatggaagaggtgatgcagnctggggaaggggtttcattctcgcacatgtt

SEQ ID NO: 458927 - DNA, 228 bp, Sorghum bicolor
taccggccggattccggtcgaccacgcgtccggctagctagctcgggagggtcgctacaggacactagtatacaccacaccacatcggactaggatcgcagcagcaaccgacggaggagcaccagggaacccgatgccaattgcagcgggcggtgaccggcccaacttccggccaagtgaacgtggggccgggcaaggcaaccccgggggtggtcaagccccgggccg

SEQ ID NO: 458928 - DNA, 89 bp, Sorghum bicolor
cgtccgcccacgcgtccgaaaaaaacaaaacaaaacaaaaaaaacaataaacaaaaaaaaaaaacaatagcaaaaaaaaccaaaaaggg

SEQ ID NO: 458929 - DNA, 136 bp, Sorghum bicolor
cgtccgcttttttttttttttttatttcaagaaaaaactcgtcaatgaagaactcatcacatgtcttgcttgtgcttaatagaggaaataagaaggggaaacttggaggcattgcgggaacgttcaaataatctac

SEQ ID NO: 458930 - DNA, 347 bp, Sorghum bicolor
  unsure (1)..(347): unsure at all n locations
cgtccgcccacgcgtccgcggacgcgtgggtcatcacatcccagggaaggcgtgatctggaccaagtggctggaagggttgctgttgaagcttgagcagtctcatcttcggtttctatgatgtcatgtttgatggttgagatggctacactntatttgcatttttggattaggactttttagttcagagagctntaaggtttaatgcatctagctatggctccacactatatnttacctgagtacctaatgtgatctcatcttcggtttgcaaagtgcctgagcctgtatccatgacctatcttccttttgctacagatctatatgataatataagtgtctgagcta

SEQ ID NO: 458931 - DNA, 245 bp, Sorghum bicolor
cgtccgcccacgcgtacgcgcgagacaaagacgtatctgccctcgaatatccactcgggtagccacgccgatcgagtccccgttgaattctgctctgtcacctgctcgatccggtggccgcgatctagacgatgtcggatcgtgatccgcatagtgaataagctacgggatttgtagagatctaggcgagccgctgacacgagccatgagcgaggtgttcgagggatactagaggcagtactgcg

SEQ ID NO: 458932 - DNA, 282 bp, Sorghum bicolor
gtgggttcctctcgtgtagtgccagactgccagccaggccgccgtcgccgcagctgtctcgtgcggtcgtgcctccgcatcgcggctcgtcttggagcttcaactgatccctgaggtgcggcaccggcgggtgaggcatatcggcgaggcggcaccagcggcggagttcggtcccagaagagatggcgaggggccctaatgtcgcgggcttgatcgaggacgatgcggtctccgtcatcacggagggcttagtggtgtgtgagatatggtgcagtggcagtg

SEQ ID NO: 458933 - DNA, 53 bp, Sorghum bicolor
acagtgccagctgatgcaatggaccccctgtacgcataaccgcgtgtggtccc

SEQ ID NO: 458934 - DNA, 169 bp, Sorghum bicolor
cgacccacgcgtccgagagaatctctccaccgtccagtgcccaaccaggacattgttgtcgaaatggcagcactcgcacatatgacattggtactccattcctcgcatccttgagcttgctgcagggctgtcactgcctgttctttcagccaagtactctcgtgggact

SEQ ID NO: 458935 - DNA, 69 bp, Sorghum bicolor
cgtgcggtgtgtctgtctcgttcggccggccttccttcctatccggagttattgactcgttgcttagct

SEQ ID NO: 458936 - DNA, 180 bp, Sorghum bicolor
cgtccggagagatgagagagctgggcaataggtcgtcgttgatggctccgataactgtacgggcgacgtgtcgtggacgtgacccgtgcgtggtgccctggggaggccgcccccatccagacgtccttcgattcgcaccgccaccaaagcccaacactgcccaacgtcgtcagtcacttc

SEQ ID NO: 458937 - DNA, 104 bp, Sorghum bicolor
tgtattgggacgcgcgctgtagcgactcatataagctgcagctgttgtgctgttacgcgcaactggaccggtacacttggcagcggcctagcgctcactccttt

SEQ ID NO: 458938 - DNA, 496 bp, Sorghum bicolor
cgtccgcaaagaaatgaatgaagtgctatttaaatcattgcctggtgatacacctgaccttgagatgttggcatcaagtcatcttctgagccaaaggaagagtgatttgattgtcaaagaaaggcttggagtacgtaaaaccaggctgaggttgaaagagcagattcttacaatgaagttcaaggcatatcgtcacttgtggaaagaggatgttcgactactttctgcaaagaaacagcgttcaaagtctaataagcgcattgatcagagcaaccgaacatcacaaattggatctcagaggcaacgctcctctaaccgctcacgattagccatgcctgctggtaatttaagtacattctcaactccagaaatgtcagatgttgcaaggaagttgttttcagaattccaaattaagcgctgcagaaattacttgaaaatgcctgcactgattattgatgagaaagagaaggaatgctcgaggtttctgagcaagaat

SEQ ID NO: 458939 - DNA, 254 bp, Sorghum bicolor
  unsure (1)..(254): unsure at all n locations
cgtncgcgcacgcgtccgacgacacgtccgtgattccattgcaagacattgccttaagaactcaaacactgctgggttcataaaatatcttagaggctgatgttctaatagtgggggcccaaatggggggtgcggatattccaattttgttggaaccaatttttggaaaacagatggaatttcctttggaaggttccttggagttggcttggattagtcttaaaaagcagcctcgttggttggtcaaggttctt

SEQ ID NO: 458940 - DNA, 477 bp, Sorghum bicolor
cgtccgcccacgcgtccgcccacgcgtccgctgctcctggtgctgaaaatgcaaagattgatgaagctgacacagaacagcaactgcctcctgggcagcaggtgaaggaggctccaagcaaccctttggggaataatgaaaatgtgaaaatggaaaatgaagcttctgctcagggaccagtaaatgaggaatctgctcctcgtgctgaaaatgtaaagattgatgaagctgacacagaacaacaactgcctccatctggtgaggccatggtagacatatctagcgagctactcagccatgacgaaaaggtggctccaagcactgtccctttaggaaatgatgaagatgcacatatggaagaggcttctgctgcacagagagagctatagcactaagttgctcatggtagtgaaaatgcgaaacttagtgaagctggcacgtctggtgaggccatggtagacgtatccagcgagctac

SEQ ID NO: 458941 - DNA, 177 bp, Sorghum bicolor
ttttccccttccttccttttcccccggttccccttacccggtggtggaaaccttaccccggcttggccgccgcgggggggggccgcttaagaaccggcaaaaaggcaacggtactattcttggaaggttccttccttccgggggcggtggccccgcaaccgaccgatcgatcggtcg

SEQ ID NO: 458942 - DNA, 447 bp, Sorghum bicolor
acgcgtccgccaagcgtccgggcacggggcccccttgaaggcctggaccaccaaccgggacattcccaacaaccacaaccaacgccggggctgaggcagccaataaccgccgtaaccgcctgcccggcccttggttatccgccccgcatggccgcctggtacttaaacaactcttaatcctcctaccggccgcggcttccccggccgggcacttccccgtacggggcgtacggccacgcttacccgccgcggccggggccggaacccccggcctttaacggcgcctactacgaccgcgcggagcaggctctccccgcgcggaacgagctccgcaccctcttcatcgctggcctccccgccgacgccaagccgggcgagtctacaacctcttccgcgatttccccggatcgtctcctcccacctccgcacgggcaaatcctccccagc

SEQ ID NO: 458943 - DNA, 294 bp, Sorghum bicolor
cgtccgcgctccctccttcctctcatccgtgtccaagcgacgacaccacacgcgccggccgcgcgccaccgagatgtggagctcagactccgaccccgagctcaccgccgccgccgcgtcgtcctcatcttccacctcgtctgctacctccgtctctgcctccccgccgccgaccccgcctcctgctgcacgccttctccgccaacgcaacggcaaccgccgccgccgccgcagccgcaagcagggcagcgccgtcgccgactcttgtcccgcggtccccgagcctgaggcgga

SEQ ID NO: 458944 - DNA, 222 bp, Sorghum bicolor
cgctagcagagtgttcaacggaatacgtcgacatatgtatgcgctcatgcgacactacctgtgctaagcgcttcaagattctagataaggggcgcgtttgagtatcatacatctgctggctgtcattataaagtttttcgccggatttagccttgctgggcctggtcaccccgtaacgctggcgataggctatgacgctggcgatcaagagactgcacgagt

SEQ ID NO: 458945 - DNA, 244 bp, Sorghum bicolor
cgtccgcaaacctgtaaaggacctggaggctgcattccaggatcctgatttagaggcaaatcctatgctatttcttaaccaaattgttttgcaggagtttcaaaaccggcaccatgagatagaatcaatctcaattaaacttaaggttgataagggtgaccatgaaatttgctgttttgaaatcgaaccagtaaagggtaaatggttcccaactttgcggactctggtttcaaaattaaatgac

SEQ ID NO: 458946 - DNA, 100 bp, Sorghum bicolor
  unsure (1)..(100): unsure at all n locations
gttcgcagcaaactgggctcactatgagcttcataccatatatggtgatagcttactgactgatgaggacttctatgactattatcatatcaatntcatg

SEQ ID NO: 458947 - DNA, 249 bp, Sorghum bicolor
  unsure (1)..(249): unsure at all n locations
cgtccgcccacgcgtccgnntttttttttttttttttttttttttttgttctcataccctcgaacttctactgcaactgtcaagagataaaattgtacaacaatatatacagtgccatcaaaaagaaacttatgaccaactgtccatgtgcagtgccgtcaaaaaagcaacgtacaagtagaaggaacacctgggcagtcacccctggtccatttagaacgaaatcttcaccaatcgattccgtcagca

SEQ ID NO: 458948 - DNA, 503 bp, Sorghum bicolor
  unsure (1)..(503): unsure at all n locations
cgtccgatatgcagttatgagtatcactctttttatgatgatgactacttagtcctttatgataattcgattcgacttctactgaattgaggcattgggcgtatggaatgatgagaacattacatatacatggtcctctttttaattgttaataatgagctgaggcattttggcacatgcaatgatgacctactttttcctagcaacaatcaaatcttttttatgctcttcattgctatgtgccgaaaaagtccattttgtttgaagataagcttgtgttgtcatgaataatgatttctttcacaagtatatgtctgctctttgtgttcttagcgaaaaagaatgttgtgtgtgatgtttatgcctctcaattttaccttccatatgtgagccttgtttattttccattgttttcccattgcttcagccataactatatcttgttcaaaaatgactttgcattngtttatatctgttcagcttcacttatcagccttacatga

SEQ ID NO: 458949 - DNA, 88 bp, Sorghum bicolor
cgtccggagcgtcgtaccaccagacgtgcatgccagcgttagcacccgcactacccattggcgcgtgtccgcatccacggggggcgac

SEQ ID NO: 458950 - DNA, 393 bp, Sorghum bicolor
  unsure (1)..(393): unsure at all n locations
cgtccgaaaaaaaaaaaaaaaaaaaaaaaaataaaaaaatataaaaataaaattattatatatataaaaataaaaatatttaaaaaggtatataaaaaaaaattaaatatatataaaaaataaaatttaatattaaattttgggccggcccttttaaagatccaaaatttatttccccttccttttaaaataaaacttttttaatatggtccctaaatttaatattacttcccgttgttttaaaactttgnaattggaaaaacctctggtttcccaattttaattcttttgaaaaaaattccccttttttcaaatttggttaataaaaaaaaggcctcaaccaatccccttttcaaaaaatttcccaccttaaattgcaatatgaacccccct

SEQ ID NO: 458951 - DNA, 247 bp, Sorghum bicolor
cgtccgctgcaatctcaacggaaggatcaaaggctccaaatataataaatggatcgacgcttagttctgatttcaggggcaatctggtgcctactttcagtgccaccaagagaaaaaacttcaaacaacataaaaatcagaaaccgcaaccatcagctccaattgacaatgagcacattttgggagttgaagggacactgaacagcctactggatgtggacggtggtatcagcaagcgaaaggatgc

SEQ ID NO: 458952 - DNA, 114 bp, Sorghum bicolor
cgtccggcggaagctggggtgatacaccaagatgctacagagaactgatgacaagacacaggactgcatgggcctgcagagagtcgtttcgcgtatactcggctgctatcacat

SEQ ID NO: 458953 - DNA, 434 bp, Sorghum bicolor
cgtccgcacacactgacacgcccacaacctacccagacccccgcgccgccgtcacgcccacccccaccgcaaatcgccgccgccgccgccgccatgggctcctccgtcagccaggccggggcccctcctccacctcctcccacatacgcgtcgacgcctccccccttcgcgcccgctgccgctgacgccgccttcgccaccccgccgccgaaaccccatgaggaggaggcgaccgaggagaaggtggactacctcaacctcccgtgccccgtcccgtacgaggagatccagcgcgaggccttcatggcgctgaagccggatctcttcgagggcatgcgcttcgatttcaccaagatgatcaccccgtgcttcgctttgagccacagcgtttacaatggatccactgagatcccggcacagggaaaacgatgtga

SEQ ID NO: 458954 - DNA, 499 bp, Sorghum bicolor
cgtccgcgtacttgtgctggaagtcctgcatctaaagaaacagacctgtactcagattggagtgagtcagagaacaaccatgcgcctttagcaactgactcagagggcacttaccagtccagggatgttcctgctgaagacagtgcagtttaccatgtaccaaacttaccacatcacagtgattctggatcatctccatcagaacattatggagtgggaagtggaagtacacattctgaacctgaagaagtggtaccattaactgcaacttccaagcagaattcagttaaaggattatgtgtatcaaacaagatgcaatctccaaacggtgagtgtgatgttactgaatacacagatgatacattagatgcgcatgatgatgctgagcaccctaatgcatcaaatgacaacaatgattttgtgactaatctgataacaaagagcttcaatattaatattgctatgcgcatcggaagagcatggaattatgttaatggct

SEQ ID NO: 458955 - DNA, 291 bp, Sorghum bicolor
cgtccgcggacgcgtggttccggtcttggttttggttttggcggcaccaaccggacaacccacaagcgcgcttcgggggccaatggccaacgcggacagggaccaatggccaaggcccccgccccggggccttttcttcttctggcgtttcttggcgttgcaacggggggccgacacgaagcgcccgggccccgggcgttgtggttcattttcgcggggcccgagtattcgcgccttccgaaacgggaccacgggcggcacgccggcgggcccgcgcttccggcggggctt

SEQ ID NO: 458956 - DNA, 349 bp, Sorghum bicolor
cgtccgatactgaatggctcaagtttggaaacacttcatcccgtcccatccccaatctctctccatctccggctctccgccttccacagatccccagatcgccacatcaaatcgaatccacccactgcgccaccccttcaccatggagtctcccaagcgagagcgagtttttccccaaggttccccgcgaaggagccccaaggcgatgaggcctggagcagcaaggggggccgacgagaacacaagccctaagcatctcgtggcggtgggggccgcgtcctcgcagaggaagaaggtgctcggggagaggaacgacggcggcgtcggggtcatgaagggcgccacagcg

SEQ ID NO: 458957 - DNA, 459 bp, Sorghum bicolor
cgtccgcttttttcttgtttttttaagcataatacattgattcattcatatatgagctagcccaatgtatggtcacacaagtacaaaatacattacaagctcgcagacatgaaagttgtgcatgagaagccatcaacatccctacctatctcatgagaccaaaagtcatacatccactactcgtaaccaaaagcttagctcactaacactaaaagctcattgctcaacttttactaacagtgagctcatagccttttgtctaataggttcaaaacaaaacacagcttcgatgagcacttttcacttgtcgacaccaccaagtacgctgccttggtcttgtaggatggcttatctcagcttgcaataaacaggtagtccatgcttctttccttttctccacaccttatgacaagttaagttacccatctttgcaggaatgagcgcttgcaaactgggcac

SEQ ID NO: 458958 - DNA, 504 bp, Sorghum bicolor
cgtccgcttcaggaagaattgagtgagcgtgctaatactccaaatggagtccaccctgacgattggaggatatctcttacgcttgcggccggtggagggggtaatgaagagtctacaagtgttgatggtctaaaatcacagccaaaagttccatcgaaagaggcaggagtcgaacctttgcttgatgctggtttgtctcccttttatgaatttaattcttctcttttgtaatcattttgcttctaagataacggtttgctacacttccttttctttttggtagcctgtcaactatttccaggatcatcaaggttaaacttttgaaggcaggcatcttaggtcatactttttttccatagaaaatgtgcaaagtctgatatcttaaaatagatccccataaactatttaattctgtagtcaataaaatgaatgagtagaattttagcaacttttagagtatgcctttgattacttctgggtattagatgacatttgatggtgagt

SEQ ID NO: 458959 - DNA, 146 bp, Sorghum bicolor
cgtccgatgaacagcaaacaaagccttgcagatctagctctgaagattaatgagaaggtggggggcacgaacaccgtgctggtagatgcacgctgaggggaatacctctggaaactgatcgacctacaatcatatttcatgctgat

SEQ ID NO: 458960 - DNA, 520 bp, Sorghum bicolor
cgtccggtgtcatcttctgtctgtcttgatcgcatttgtgatttgattgcccctttccgtgacatggacaaaccatggaaagttcgaattgaagctagcagggttcttattgatcttgagttacaccataaaggacttgatgcagctcttttgttgttcttgaaatatgtagatgaagaaaagtctttgcgaggagcaacaaagttggctgttcatgtcttgcgtatatgtcaagcaagtattgttccttacgccaatgatcaaataaatttgacaactctaatcggtcttcttcatctgcttgctggcacaaaggcatacaataacgtatttcttcgtcatcatgtgttctgtatattgcaagttgccgctggaaggtccccaacattatttggtgttccaaagatcgtcacatcccctccggtggtcaaggacatatgtagtgatcagcacactaaagctgattcctcgattcctcagccatcaaagcctcaggaaccttccactagcactcctagtg

SEQ ID NO: 458961 - DNA, 345 bp, Sorghum bicolor
  unsure (1)..(345): unsure at all n locations
cgnccgcccacgcggcggccnccnccnccncaaccncccccaacnccgccgccacnggccgccgcnnngcccnggcacaggaagcagcggcgcgcaaaagcgcccgggaccaggagccaacaacgcccccgaacgcgccgaaancggcgacaccggcaaggcggcggggacgccggaggagcagcagcagcagcggcggagcgccgaggacagggagaccgnggagcncacggagacggaggagncgcaccacaaccgcacgcgcgaggagggncgccacggaggccacggcacgcagcgccgcgaagccggaggacgggaccgggacaagcnaaaagggaaaga

SEQ ID NO: 458962 - DNA, 227 bp, Sorghum bicolor
cgtccgcggacgcgtgggtttattctctctctaccggtatggctagctgtctgggtccgtagctctgtcgcgtgctctcagtcgtacgcgcattctgagaggagacctgcgatgagaccttggctgagggtagtacaccatgaaggcgactatggtgacagtgcttgtgatgctgttcttcatgctctccgtgacacagtggtgcgtatacaggcacgactccacgc

SEQ ID NO: 458963 - DNA, 89 bp, Sorghum bicolor
accgcctgtacgcgcatagcgcgcggtgtgggtaccgcacggccgtcactgcaggcctacccgtcttcgttcttctcttctgccgtcgc

SEQ ID NO: 458964 - DNA, 473 bp, Sorghum bicolor
cgtccgcttcactgggtgtggaggaaaactgtgattcagctgcactagccactgagatttgtgatgctgcgtctcacatgactgatttggctgttcctcaatcggatgaggatctccatcaagatcaacatctagaagaccaccctgaaatggaggagactatattgatggtggagcctaagtgtgaggagggcgatggttccagctttgtgctcccaccaagccctccagaactgatgctggaggaacaggacgacccagggttagtagccctaggtactgaatcatgtaccggacagcagagccttgaagtaggagaggctgaggatcaggaaaaccctagcacagctgagcatggcgtcatgatagtgaagcatacgggtgaggaaaacaacaattgcaatggtgtttattcttcctgcccaccgtcatctgccaattgtgatcccatccaaatcgagcagtgattatct

SEQ ID NO: 458965 - DNA, 237 bp, Sorghum bicolor
cgtccgcccacgcgtgcgcacccgcgcgcacacagagagcaaagaaagaggcaaagcgaagcagcctacgagcaaccgcatcgatgaaggcggagaaggcagcggtggccccggccggcgcctgcggcgacgaatggaggtgccggaagcaccctgccgcgagatccggcggcggcgtgtgcccgtactgcctgcgggaccgcctcctccggctctgccacaactgcgcgcacgtgc

SEQ ID NO: 458966 - DNA, 251 bp, Sorghum bicolor
  unsure (1)..(251): unsure at all n locations
cgtccgaacatgcaaactcaagtgcctcaggttctttagtgccagaacaggtaaaaccaaaagcaagcactgcatcaggtctatctctagatgggagcacanaagctttgggttggcaaccgccaggctcatctctagaggggagtgcaaaagcttctggttggaacccaccagccctatcacttgcagggattggtaatgctgcagggtcacaagcatcgtgcccctctacacaagggagcacaaaatct

SEQ ID NO: 458967 - DNA, 336 bp, Sorghum bicolor
  unsure (1)..(336): unsure at all n locations
cgtccgcacaaaagtatatgaaaaacgctacctttttccctgtcagaaacctatgaataagtcttatggacgtacctaatttctgcaaatggctactatatattaagtcaaggcaaggtccatgtcgttcagtttgttgtcattagtgtaggcttcctgcttcctaagttcagtgtaagtccctaacagtgccggccctagggggagggcagaggtgcgacggccgagggccctcgcgagatgggggcctaaacctaagtatataatacaacatacctntagttataatncttgtttatnaatatatgcatatatatagtgcaatggnttatcacc

SEQ ID NO: 458968 - DNA, 481 bp, Sorghum bicolor
  unsure (1)..(481): unsure at all n locations
cgtccgcccacgcgtccggacccacgcgtccgcccacgcgtccgcccacgcgtccgcccacgcgtccgaagaaaggagagggagccgcgagcggcgtggccggcgagcacgcgcgcccctccctttcccgtcccgggctccctccgcgccgtgggcgaggcgcccgcgtccaccccggatccgccctcaccgtgaggccaaggatctgggaggggagaggaggggagggagccacgtncggccgcaccagctctcgtccgcgccggcgagcgccaggcgttcccccccccacaggcttggctgaggaaaagctgtgctctgtgcttcttggacagggcttcaccatttaccaagtcttgagttattgctctgctgtcagacaagaaatcaaactctctagccaaacacaatgatgacgatgatgtagtatgttaggccaggttgggtgtgtaggaggatttccctttggaacaagctaatt

SEQ ID NO: 458969 - DNA, 280 bp, Sorghum bicolor
cgtccgcaagccgggcatggcctcctgcagctgggctcttgcaagattatacccgaggacctgcacttcgtgctgcggatgcgacacatgttcgagtcactgggctaccagtcgggcttcttcctctcccagctcttctcgtcctcgcggggcgcctcgccgacgccgccgttccccctcaagcagcagccgcctccggccgccgcgcgtgctccgcagcagctcttcaactgggcaggacaccaccagccgcagcttccgccgtcgccgggcgcgggag

SEQ ID NO: 458970 - DNA, 370 bp, Sorghum bicolor
cgtccgcccacgcgtccgaccagacgccactccaccaaggcgccgccgccgccagccttcacggcttccatctcaccctctccccttcaccttccacttcctgcacgcatcacccacctgcatctgcatggtccacgcagtcatgcggtgagtgcggagtgcctgagcctgcacagcgtgctgcgttccaaggagagaagagaacattgtcatctcaaatccggccagaaacgattgagcaacggagccaataatagggtcgggatttcatctgtggaggtgcggctcaaatctattcgagcttgctcctgctgtctgatgattccagcgttctcctgctgtctacatcagagtactactagatcgatct

SEQ ID NO: 458971 - DNA, 357 bp, Sorghum bicolor
  unsure (1)..(357): unsure at all n locations
cgtccgcggacgcgtgggcgaggacggtggcgtggccggngtaattttggcaatgacgataatggtggtggaggttggagtggaggtggtggtggcaacagtggaggatggactgataacattggcagcggtggaggcggatggggcacaggtggcagtggcggctcttcctggggtggtggtggtactggtggaggatctgatgccgctggctggggtggaggcattgtacgccatcacagcaaccgcggtggtggaggcctcttttgatcagcttcttatgttgctgacagtgctggtggaccaaatggagcctggtgagccactgctggaggctctaatgactcatgatgggct

SEQ ID NO: 458972 - DNA, 420 bp, Sorghum bicolor
  unsure (1)..(420): unsure at all n locations
cgtccgggaccaaaacatgcatacaatacaatcaaagacaaggcgctcggaaatgagaaagtggaaagtttgttctcgattccctcacggctccggacgcgtgggcttgattctcctgtcaattcactgcagagtgtattcttcagaatggatgagcttatagaacaatcagatgaatggagggagaaagttaatcctggtggatgtacatcatgcctcaagaatggtgtatggcctttcaaccaatgggccattaacacggaatatggatctgaaggaagcacggcatgtgtggttcttattagagacaatgagattatggtgggaaacgtcggtgactctcagtgcttactctntgtgaacggacagacaatggtgttgaccagtgtcatgtaccatgtgattgtgatgaaagtgaga

SEQ ID NO: 458973 - DNA, 96 bp, Sorghum bicolor
cgtccgggctcgtcatggatcagttagggtacttcttaaacttgaacagactataggttgtctctcacatctgacattggtggtgttattagcaag

SEQ ID NO: 458974 - DNA, 75 bp, Sorghum bicolor
cgtccggacccacgcgtccgcggacgctgttctccttatgcgttaactgaatataatattcctcacacatataac

SEQ ID NO: 458975 - DNA, 410 bp, Sorghum bicolor
cgtccgaatcgaccaacaattccagttggacatgcagttagaagacatatggctatggactactttattaaagttaactcatcagacgcaagcgctcgcatgcttcacaacagtgaacagccttctccaagttccaccctacataatgatgctaatgccatggacctataagagtgcttgggcagactgagatgcttttgtacaatatatctcacggagcctagactctacatcctactaatgttctataatattacctagcactctgtaatgctttttatattggcgtcgagacttgccatctaccaaacctggtaagcatcactatgatatggatggctacctatggttattggattgggcttaaatcaattaagactattatgtgttccaccctttccacttatatt

SEQ ID NO: 458976 - DNA, 196 bp, Sorghum bicolor
cgtccgcccacgcgtccgcggaatcttgccttggaaccacacatgtcgtggtccctttgtcaccatggttctacccagttctttgagcgatttgcgtgcaccagccatttgtgttgtcttatatctgtattattatggtgtccaagttgaccttgactagcttgtgaaaacactggaacatattgtgatattggaa

SEQ ID NO: 458977 - DNA, 278 bp, Sorghum bicolor
cgtccgcccacgcgtccgaaagccaagaaaccgacgagaccatcatggctgctggcagcacggccaagaccctgctcctcggcttcctccttgctctcacggcgacctcgacgccggcggcggccaccacgctgacgctccacaacctggcccgtaccccggtggcgctgggaccccaacacggttccggcattcgaaacacggcgctcgacgggggcgcggctgttcttcgttccgacgtttggcgccggggggccacgctgacacaatcggcgcgc

SEQ ID NO: 458978 - DNA, 169 bp, Sorghum bicolor
  unsure (1)..(169): unsure at all n locations
cgtccgcggacgcgtggngtctgcatcacaatactgttagcttcaggtagcacaatagccaactaagttgattgcacaacagtcaattaaagctggatgtgaattcgtttataaaaaaattaaaatggcatccaaaactngaaaacaaatcttgttcatggtcaccaca

SEQ ID NO: 458979 - DNA, 491 bp, Sorghum bicolor
  unsure (1)..(491): unsure at all n locations
cgtccgatgtgagatagataatatggacgtgtcaagtgtaggtgaaagattgacctcctggagacgtcaacatcaaattggtgagttgagcttgtttaaaaaggctggcataaaaaaaaatgctgcctgtgaagagaaatgaggacctcgacctcaattccatgccatttttcttttaccaaggtttattctggtttgagtcggattcctaggctgaactctctctacctgtttgtaagatatgtgattttagggtttgggcctttattatccttattaggtacgctagaatagtaactattttggcattgcacattcaatttttcaagcatggacaatattctgcatggctgtttagttcacatatatatatatggtggtgacttgtgacctgtataatatagacaccggaatatagagaatttgtggttagccatgtgacaatctcagtgaagatttcaggcttcggngtgcaatacgttttgtaaaan

SEQ ID NO: 458980 - DNA, 147 bp, Sorghum bicolor
cgtccgcccacgcgtccggctgaatactgtaacatgagacaggcaaatgctgtgattcgtgctcttggaaatgagaacatcatccgggagtcgtattcgtctggtgttgatgtactgctctattgcgagatcttactggactataga

SEQ ID NO: 458981 - DNA, 170 bp, Sorghum bicolor
cctccgggaagcatggggcaacttgggcattggttccttcaatctggagaaaccagctgatccctaagcaattgtcacttgaggaataaattaagagtgtcttgggagggtcactttggctggactgaaggacttattctgggggagaatgggaattgatgccaagggtt

SEQ ID NO: 458982 - DNA, 576 bp, Sorghum bicolor
  unsure (1)..(576): unsure at all n locations
cgtccgngcgagatgtatccacttcaggagtatgtgaaacgtgcaaaggcttttgcggaggattttgcccaagaacaaaaggatgaaggtgaggtgcaaggaggtgggattatacatgtgctatttgtgaacttatggagattttatcaaagacgcaaggaggagtatggcacaatgacaagagaagagcgaagaaggaaatacctcgagcaaatgaaacggcttgaagagcaaggtgctgtttctaagctctttgtagacctttcatctccgtatccccgtcggcttagtattcttaagcgtttatggaggcttagtgaacggagagcatatggctccgtcagagaagggctcgctagtgcattccttcttctttacaccagtctaaagacttcaggcttccctgtccacagaatnttggaaccggaattaatgactgacctttcgaaaaatctttgtggtctattgatatgatgtcacgtatatttctaccgtgggcatacatccgtctcttgcaccacagccatagacaagcttacagcgatattgatgtcaagatcacatatgccttattct

SEQ ID NO: 458983 - DNA, 503 bp, Sorghum bicolor
  unsure (1)..(503): unsure at all n locations
cgtccgcttctctaacctcaagttgtccgttgaaaaatattaataagagtgtgttgtctgatttaggcaacggtatcaagatacagagcacatgaaggtacgagccaattcttgtccacgtttttttgcctttgatttttggtatgcaatgccggagtaatttttaggcaaaaaaatcattcagtaacaaaggtctccaaacaaaaaatgatatgtagtcactcaaacagaatagagaattatgtcaaaaatataccaacacttatgatttatttatctcttaacagaccaatggaaatgaagattaagaggctacgtttgtttgtggccaactgaattataataaaagaaatttcagtgatttctcactaattatcatacacatgtgtaaatntttcagattcaaagcanattcattttcgtcagcttgaacagaaatntaaaagatcgcatctctggcataatggtatcatattctcttgtgtactctcagttcattaaaa

SEQ ID NO: 458984 - DNA, 101 bp, Sorghum bicolor
ttcaacagtgccagctgatggaaggacgccctgacggcattacgcggtgggggacccagggccgtcctgcggctcgcgtctgttttctctttgcgcgcgtt

SEQ ID NO: 458985 - DNA, 214 bp, Sorghum bicolor
cgtccggaagacgagctcttccagtaccaagtagtcctactagttatacttaccagcagtaggaggcttgagcttgctgtgatatcgacgggattgagatggcaatggcgttgtctcaactcatgcgacacgctgctctgcgacgaggacaagagctactttctacgccattgctgtgctgcacgagcttctaaagtgggagcggtcttgatgg

SEQ ID NO: 458986 - DNA, 453 bp, Sorghum bicolor
cgtccggaaaaagcttaaagcggtgcagcgcattgacaaagaaccaaacattgttcaacttatttcaggtatttcaaagaatactcaaggcctatgcggctaagttatatgctagattaccaaaaggtggaactggtattgttgcagctgccactggtaccgatgggcagatcaggacctcagacagggacgagagaatgatatgctacatcgtcaacactgctgaatattgtcaccagacatctggtgaactagctgagaatgttgctaagatgattaaccctcagtttgctgacaaggtggacatgtctgaagttcaggatgagttctcggccgtgatcacaaaagcattaatgactctcgttcacggacttgaaaccaaatttgatgctgaaatggttgcaatgactcgtgttccatgggctacccttgaaagcgttggtgatcaatcag

SEQ ID NO: 458987 - DNA, 56 bp, Sorghum bicolor
aatatatgaaaagaagttgagtttaaattcggtgctatcctttggattgtttgttg

SEQ ID NO: 458988 - DNA, 450 bp, Sorghum bicolor
cgtccggttctccaggagaccaggagccggcaggaggggaaagagatcacgccggtcgccgatctctcaccaccaccgccagactccatgaccggcggcagcggcgggcgacgagaccacgagtccgaccgagacgcatcgacggccttgcccgtcccggggccctgcgcctcgacgcaccgcgcgctcgccgagtgccaccgccgcgccgcccgcggaccgctgcagccggagggctgtgccggacctgaccgccgctgcggagtgcgtcggccgctgctgcccgacagccgacgccgccgacccttgggagcgcggcccgcctcagcgtagcaggcagggcgcctcgcctcgccttgctcaggtataagagccaataattggtagaattatcggactgtacttgtgcaccgatcgtctatggaaccttaatttgagaaagatcacttg

SEQ ID NO: 458989 - DNA, 163 bp, Sorghum bicolor
ccataaacctaggatactgacttaggcattaccatattacatacacctgtgagcggtcttgcataaaactgacaaaatcaaaccctgctgacaaatacctagtcatctctattgaacctactggataacattgtgccactgcagacatgtcaagctaccaaag

SEQ ID NO: 458990 - DNA, 447 bp, Sorghum bicolor
  unsure (1)..(447): unsure at all n locations
gaaaaggaaagctggttgggttgggcggcccgctccccttcgagaacgccgccgccgcccgctccccccatatccatctctgtctcctctcctgttgatctcttctctcgcggaagagctcgcactcagaggacagagaagagaggaggagatgaggaagctagtctcctcgcgcctggcggcgctgtcgtcgccggaggtggcgtcggctgcggcggcggcgggaggcgccgcgctggcgctgcggngctggtgggaggaggtgaacgactcgccggcgtggcaggacgggggccttcttctcctctccgccgctacgccctcgtgtccgctgtcgcctgattcaataatcagaattcagtgcgggtgccggaatggtcgacacacaaangtttcatctatgaattcatggatgagtcgtcatatattgattatgcttggtctctc

SEQ ID NO: 458991 - DNA, 402 bp, Sorghum bicolor
  unsure (1)..(402): unsure at all n locations
cgtccgcccgaaactgcagttttcctgcactcgttggtccaaaatctccccatttcgcacggaaatctcgggggtttgcccactccatgcctcactccgctcgttgatccagaccgccaccggagagctgcgatttttccgccccgggagcggcgtcttctcgatccgaggcccatgcatctgtcgctatggaagccgctatcccactgcgccgccgtcctcctcgccaagaaccaccggcgccgtggcggcggnggcggtgggcacggtggtggcagcaacggccaccgtgacgacccggcctccttcctgcggcagctacgggacgcgctcgacgccgcgtcggaggatggctccctctgcccgccgccagacaccgccggcgccgatgcgngacgccgc

SEQ ID NO: 458992 - DNA, 286 bp, Sorghum bicolor
  unsure (1)..(286): unsure at all n locations
cgtccgcccacgcgtccgcccggcgccggtgcccgtggccgccgcagcctcgtccgccgcccgccacgcctacgcgcagcatcaggcggccccgtccccgccggngatgaaggactcctccgccgacgtcgcggacgacgacgacgacgacgacgacagcgacgacgacgccgtgagcgacaacagcgacgaggacgaggacgactacgatttggaggaggacgacggccacatgtaccccagcaacaaccgccccagtcatcgtcagcacagcggcggcaagcgc

SEQ ID NO: 458993 - DNA, 347 bp, Sorghum bicolor
cgtccgctaggcttctaccagcagccgagcaccggaaagcggaaagaagcaaaattagcggtgtgtcactgccatctacggtggtgtgtcgctccaatctacggaagcataaatggcacagttccggattcctggttgcagatcggaggaaaatactcttctgatcaacagttgcatggatgcaagtagtacagggcacatttaatgtattcacattgctgcacagaacgtcgcacagcggcaggtggtgcttacacaaaaacaaagctcctacaagtgtccaggtcagtgcagtgaacagcggcctcaagctatacacagttgagtgtcatgcgactagtgcagtt

SEQ ID NO: 458994 - DNA, 468 bp, Sorghum bicolor
  unsure (1)..(468): unsure at all n locations
cgtccgcccacgcgtccgtcgacccacgcgtccgcgacccacgcgtccgcaagagcacgtgaatctgaaactgagttgagaagcaaaattgatggccttaaagggaaacttcgctcttatgaagctcaaagaaaggaggaagaaaaggtcctgtttgctattgataacctggatacttctactgcaccaatgcataaacctaagaactatggcaaggcaaccgacctgctgaaatccgaggaggatcggatgaagctttggtgtgaactacagaaggcccgcgaacagctgtccatggtacaaaaggaaataaaaaacatgaataaatgtgattatattgattgtgagatngcagtccttgaagcagaaatagaggattcctgcctctccatactggaaactgacattgagaagttggccgtaacaacacgttgacagagatttgggagggagggcaaaggacatgga

SEQ ID NO: 458995 - DNA, 239 bp, Sorghum bicolor
cgtccggtgcggcatatagggacactgcagatgctcttaaatcctgaggggacttctgccgtggtggaggatgagaagaaacctgaagatgcaccacagtctgaggttgagaaggacaaggacggtgcaaagaatgaagaggaggaaaaggaacctgaggataaggagatgacttttgaggatatgaaagggtctggaggaaaacgaaagcttactgccctaagctgagagagaaagtg

SEQ ID NO: 458996 - DNA, 213 bp, Sorghum bicolor
cgtccggctagactcgccgctgcacggacgcagcgattagttctcgcaatggcggtaggcaagaataagcgtatctgcaagggcaagaagggaggcaagaagaagaccgtggatccgttcagcaaaaaggataggtatgatatcaaggctacagtggtcttagcgtgtcaacattgcactgaccttgcatcaggaccagggcaccaagattgc

SEQ ID NO: 458997 - DNA, 300 bp, Sorghum bicolor
  unsure (1)..(300): unsure at all n locations
cgtccgcccacgcgtccgcgcttcccttcgcctcgcgcaccgatggaccccgcgccagcgccgccgcccccattcgccgtgcacctcgtcaccggcggcgggtcctcgccggagctttccctcctactccgctccctcgccgcatcccgcgtcgtcgcccttgacgcagagtggaagccgcgccgccgcggtagccctgccgctgccgcccctgcggccctgggcgacggcagcacgtcgctggcgttagaggcatctnccagcgccgcgaagttcccgacggtgacgctgctccaggtg

SEQ ID NO: 458998 - DNA, 431 bp, Sorghum bicolor
acccgatcaaccacccctacgcggacccgctcctgctgccggcgtcctcgtggcagcacctcggcgcctcccgcgtgctggtcaccgtgtccgggcaggaccgcctcagcccctggcagcgcgcctactacgccgcgctcaggggcagcgcctggcccggggaggccgagctgtacgagacccccggcgagggccacgtctacttcctcaccaagctcagctcgccacaggcgctcgccgagatggccaagctcgtcgccttcattaaccgcgacgactagctaaccggccggagtacacctacctgccgccgcggcaaccagtaactgcagtctgcggtaccgcgacaacatcatcagtactatacctatactagtaactagcgagaggggagaggtgattagtagtagtagtagtagtaattacttttt

SEQ ID NO: 458999 - DNA, 404 bp, Sorghum bicolor
cgtccgctcacgcatcacgccgcccttcgttgtacgtcacttagtgagaggaggcacgagataaactcttcatcgagagtgcgtgctggtcaatgcttaataatcactgcttgactctctccaagcttgtgagtacggattagcttatccctgcacagacggcacctcacttgtcaatatcctctacaacctaccgactcctggcacttcttagcagcacgagagactcaacttttcaccttccttgtaggaagaacactaactagtccgttattcccacataagaggggctcttagcaaatggtaacatctttctcatttattaactgtaactgctgattcaccgggcgaggtacacacatctgtggcagctgtttattgtgactgctgtcactgcaacctgt

SEQ ID NO: 459000 - DNA, 227 bp, Sorghum bicolor
cgtccgcgagctccacagtccaagctcgcactcgcgagtgctagcatctctcgggaatggcagagctgcgtggcttcgtgatggcttcggcggcggcggctgtgatggtggtggtggccgtggtgtcagtggcgccacgcggcgcggaggcgaagacgacgatcgagccgtgctccgggtccgactcctgcacggcgctgctgggctacacgctctacgccgacatg

SEQ ID NO: 459001 - DNA, 387 bp, Sorghum bicolor
  unsure (1)..(387): unsure at all n locations
cgtccgcctctacctcccgcccagcaggctgcaccaccaggccgtggcggttccgccgccgatgccgcccctcgtcgcagtggcggaggacgtcgtcgcctcgtcgaagccgtccacggcgctggagctccggacggggcctaaggcactcccgttcgacctcaacgagccgccgtcgctgatgttcggctcgcgatctccatgaacgcacatggagacggaggtgatggtagatcaatagtaggatcgagtagggatcgatcatggaccattgaacccagtggtagggattgcgtagtgagggtaatcaacaggtaggagtggagatcatgggtccggttgtatatattctagtagtatatctatntaaggaaaatcttgccaaaa

SEQ ID NO: 459002 - DNA, 262 bp, Sorghum bicolor
taccgtccgaattccggtcgccacgcgtcgactcctctgatagcttgcctcattccatctctggttcagtggatggccccactctctggagaatagctactattcttccttcttttcttcttttcccaaatggttaagctgactataactcagctcgttagattttctttgttctcgatcaacgctctcctgactcctctgcaaaaaaaaagagaggaaaccgaggcgacaagcaagcaatgggtgtcaagggattcgtcga

SEQ ID NO: 459003 - DNA, 159 bp, Sorghum bicolor
  unsure (1)..(159): unsure at all n locations
cccacgcgtacgcagacgcgtggngtctcgcacgcacacctgagattccttctcaattcggttcgtgcacaaatctgctgtgcgggcgcgaactgtacattcgtatcactgcttcaaatccttagagactatacttaacagtcggtactatctgatctc

SEQ ID NO: 459004 - DNA, 420 bp, Sorghum bicolor
cgtccgcccacgcgtccggcatttccagacttggagaataggtatactcttttttgctgctgggaactgcctcaacttcatgtcatttgcttatgctgcacagtcactacttgcagctcttggatcaatccagtttgtgtccaacattgcttttgcctactttgtgttgaacaagactatttcagtgaaagttatggtagccacaacatttattgtctttggcaacatcttcttagtatccttcggcaaccatcaatcacctgtttacacgccggagcagctgatcgccaaatacagcaatttggtgtttgttctttattgcatgtcattggtctttggtgtttcatttaaccactatctctacaggagtggagaaactattatttcaaatagttcaaaagatgctggcacacattggag

SEQ ID NO: 459005 - DNA, 546 bp, Sorghum bicolor
  unsure (1)..(546): unsure at all n locations
cgtccggaagaaggtgggctttttaggaggcgaattgttgtacaagagctattcaatagagagtttatagaagctgtgttgcaagaatggtgcaagacgatgagtaatttgcctgctggtctccgccaagcttgtgagatgggtttggtgagttctgcacagatggtacgttacttgtcaatatttgcaagacctacaaacactaggtccttctcaagagctcttccaggttggctttccagaggtcttgttggaaggacacttgcagatccatcattcccacataagatggccttggagtttatggctaccttttcctcatctatttggtgggaaatgaatattcgcaaggagaggtttgaacaagaatgggacttggtgattgtgaatgctttgactgcatcgtgttgcaacctgatggttcttgggcttttggcanccgtgccgtcataaggaagtacatctcgatttgacttccaaaatgcaatngagaaactcncaaataacatattngagaagagctatccttngtagagaggttgatct

SEQ ID NO: 459006 - DNA, 492 bp, Sorghum bicolor
cgtccggagagactcatttaggagggagggctttaatcttaatggacaaacagaggataatgtggaaaacagaactgcacgaagtactactagtgttggtggcactcaaaatcaggaaagccagcctgaatcagctgcgcttgggcttcataatgcatcattgctagctgaaaatatgcactctactaggcaaattgttgttgaacaggctggtgcattgctgtctcaactctcagctcagctgggagatctagagaatgtaactgatccagcaacacgaagggacattcaaaatagtgcagttcgcgtgggttctctacttcagaacctaggttctttgcttctggaacttggccgcaccacaatgctactgcggataaatccgtcatcttcagaagcggttgtaaactctggaaccagctcttatatatctccatcagggccaaatcctcttatggttcaacctgttccatttccaggaaggtctgtcca

SEQ ID NO: 459007 - DNA, 186 bp, Sorghum bicolor
cgtccgctcagacattcgatacgacagtgaaaacgtaagctgaagttgaaactgctgatgacagggatgatgacttgacacaagttacgacgcattacaggaggctacacagacaacaattccgacataacttacaataatactcagactagtgtaggagctgcattgatggctttatacacacat

SEQ ID NO: 459008 - DNA, 328 bp, Sorghum bicolor
  unsure (1)..(328): unsure at all n locations
tcgacctacgcgtccgttcacaaccacacgcccgtccaagagagcccggttcacatgcgcttgttcgcttccgcctcaccgccccgcctccttctctctccttctatctccaatctggactactccattgcccccttcgactattccgagctagcccatggccgcaatggcgagcagcagccccatggcggtgatggcgactccggccgccgtgctcctggcggcgctggtgctgatgatgctcagtggcgcggaggccaagtttctgcggcccaacaacatcaccgtcgtgggcttcgtgtactgcgacgcctgctncaacaatacc

SEQ ID NO: 459009 - DNA, 406 bp, Sorghum bicolor
cgtccggtctggctgaaccatcctcagcggaccctgggccatctttccgtggcgcaggatcatcctctgcaagccgtgggcgatcttctggtctcactggatggtccacagctgaccttgagcaatccttcaagagaacaaagagaacgacaaacatgcagtggaagatatcaaaacatagagcaagctaggagcacctggcatgatctatggattatcctctaggctatacagcagttggttccttttgccccatacaagctgccatcttttgtgtagaaggtgcaatgctgtacttgctcattgctatggtaccattgaaagcagccgacaatggggcatagtatacaagaggtaatcaataaacatcaagatcaagtgacgtggctttaactataatctaatg

SEQ ID NO: 459010 - DNA, 392 bp, Sorghum bicolor
cgtccgctatgtcactggaaaggagagcttcctggtcacaccactttctggattccacggttgccttgctggctttcttgtggccctgaagcaactcttaccaaaccttgagcttcctatgtgctttttctggaaaataaaggcaaagtggatgccattctttgttgtatgtttctcaagtatcatggccttcattgtgcctcgattccattaacttcttgccgactttggtgtccgggatgtatgttagctggctttacctaagatacttccaaaggaacccactgactggacttaagggtgatcccagtgatgacttctccttccacagtttattcccagctgccatgagaccagttacagaccctgtggccaacctggttgataagatg

SEQ ID NO: 459011 - DNA, 116 bp, Sorghum bicolor
tcacgcgtccgcccacgcgtacggtgcccagccgccgccactttccccacttcccggcgcctacaccaacgccgcgcgcagcaagcagacatggcgactccaacgccaccagcgat

SEQ ID NO: 459012 - DNA, 360 bp, Sorghum bicolor
cgtccgaaaaaaaaaaaaaaaaaaaaaaaaaaaaaaaaaaaaaaaaaaaaaaaaaaaaaaaaaaaaaaaaaaaaaaaaaaaaaaaggggcggccgatctaaaaggaatccaagctaacgggggcggccgttctaaaggatccaagtttaatagccgcgacttaaaacaaaataactgttctatggtgtacactaaattaaatggaaagcccctggtttaacaaaacttaaactggaaaaaccctatcctccccaaactaaatggcttagaagcaaatacccctttacccagctgccttaaaaacaaaaaggcccccacaaagggcaatggcaaacagctttgaaccttaaatgaaaaagg

SEQ ID NO: 459013 - DNA, 361 bp, Sorghum bicolor
aaaaaaaaaaaaataatataaaaaataataaaataaaaaaattaaaaaataaataaaaataaaaaaaaaaaaaagtgcgaaaattaaagaggattgaggtggaattttgattgcattcgacttcttctcttttcaaaagaaaaagggggggggcttttttggggtaaccaaatttatatcgccgggcatgggaaaactttttttttttttgggttactctaaattaaattctgtgcccgtttttttaactggcgttttctggaaaaattttgggttttccaaattatatgcttttgggcaatattctttttttacctggggggataaaaaaaaaaggtgtccatcctttttcttttttaaa

SEQ ID NO: 459014 - DNA, 255 bp, Sorghum bicolor
  unsure (1)..(255): unsure at all n locations
tctacgcgtccgatccgccgccccccaatccgcctgctaggtccttgcacctccgcccatggctgccgaagctggcccaatctccaaggtcctcgtcgtcgtagcgatgcagactgaggcgatgccgctcgtcaacaagttcaagctcgtcgaggcgcccgcccacaatcactttcctaangtgccccatggtaggtaccatggcactacaagacctcacatgaccttgattgctggaaggatgctgtttgagtc

SEQ ID NO: 459015 - DNA, 270 bp, Sorghum bicolor
gtccgttccaaaataaagccggcccggctttgcattcgaaccgtcgtcggagactacagtttacaggagtaatgtgaagagacattaccgacaagtgagcgcgtgtgagggtgatcaatcgtccaacctgaaacgtttgaatcgtaatttttccttttggggcaatcaatctttggcttcttaattgcaaatcggcttggaattctttttcttcttttaaacaaaattaaaatattcgcccggggtacttctggtcgaagggggaaggaa

SEQ ID NO: 459016 - DNA, 420 bp, Sorghum bicolor
cgtccggcaaatgctgtcaagtttttccccttgtgcaataaatatctttgcgctatgaatggatggaatgaagtgggccatgttgtaatgtcttcttcgttttcaatagccaatccgatggggtacgaagagagcaaaaatcatctcctcagtctcagttaccctgagctgcaatgtttgtgcaaaaagtataaccttcctgctaagaagacccactctcagttagcaagtttgctcgcttcgctgcttgaggcatctccatctcctactgcccctcctgtccaattagcaaatatgaaagaagcatccacatgcaaccttgttaacaacaaaagaggcccatacagtggcagggatgatgacataccacttgtgcacacaaagcatcaaaaaggatatcaaacaactgttgatgaaaca

SEQ ID NO: 459017 - DNA, 153 bp, Sorghum bicolor
gtccgcggccgcgtgggctgcattccgcgctggtgccattccttccaaccatccagccctctgagctccctgccttccaatctatccaattcatccctgcaggtcaggtcaggttgaggtccctcgtcgtcgccctcctcctccttcgcgtcg

SEQ ID NO: 459018 - DNA, 454 bp, Sorghum bicolor
cgtccgcggacgcgtgggggattctaatgtaaagagctcccatattcctaaaggttctcaccatttgcattctggtgaaaaaaataactataatacagatggctctcctatgcaaccaggaaagcatcctgttgatccaaagacatcagccttggataaaggtgtttcaagtatgcatgaaaataccaaaagcacaaattctcttcaggatagaaatggatcaactcattgcccaccagatggaaatcctccgctcggtttaccatctggaaaagagaaatcatatctcaagagcaacaagcaagattcacagaagcctaaaccccaggtggtctgctcacctcagaaagaaagcaaattagattcccattccactccattaaaacctaatgggtcaaaaatgactccacaatcaagacaatacaatgcttgaaaatgaaggcgacatggaact

SEQ ID NO: 459019 - DNA, 62 bp, Sorghum bicolor
  unsure (1)..(62): unsure at all n locations
aaaaaaaaaaaaaaaaaaaaaaaaaaaaaaaaaaaaaaaaaaaaaaaaaaaaaaaaaanana

SEQ ID NO: 459020 - DNA, 490 bp, Sorghum bicolor
cgtccggcgtcgcctctcgattcgattctttcatggatggatggtctccgcgccaacccttagcttcctccaaatccatcgatcgtcaccatcccgaccccaatcccagccccgccccgccccgccgatgatgcagcagcaccagcaagaggaagatcgcatccgcgacttcgatcccaagcaagggggcgaatacttcaccagactacaattcgtcgatctaacaaaattcgatctcgacgaggagtcgccatatggtccgatgagatttactgatgctgtctataaaagtaaggacgactatgagctgtgtgagggaataaacattttctcagtgagaatagccacctctgatgttggcttcccaatccatgtgtacggcactgtcattgctcgagacagtttggacaaaaagtgtgtttatgtcttccgctgtgacagagatcattgccaactcatcaactctaaggatgaatctttggtcttgaca

SEQ ID NO: 459021 - DNA, 218 bp, Sorghum bicolor
  unsure (1)..(218): unsure at all n locations
gttttcctacaacgtactgttcagaaatctcaagagctagcagaaactttggccacagataactctgcattaactgataagttcaaccaacaggcacatataatcagccagttgacatctgacatggagagattgcangaagaaattcaagctcaactgctggcgctggagtctgtcaggaccgagtatgctaaatgcacaaactagaatgcaaatgc

SEQ ID NO: 459022 - DNA, 335 bp, Sorghum bicolor
cgtccgcccacgcgtccggtgctcctcggcgacgatccgcttgtcagctcatccttggccatccgcatcagcccagaagctcatgagagattcaactcggagcttgacggccgtgcccgaaaaaactgcaggccgcactacctgaacagtaatatgactgcgagggccagcataatcctgatggatgaagagcaggacctcatgatcatgatgctgttcctgcagcgcgaggaccttcgtgatctgccctacatcccagatcctcctgaagtcattggtatgttaaagcccgtccccaagcgcacctctgacggtgcttatgagctgttcctcat

SEQ ID NO: 459023 - DNA, 385 bp, Sorghum bicolor
cgtccggcggcgtgccccttcggctcgacgcggagtagagcgacgacacaccctccggcgccggcatgtgaagctgagcagcagcgcagaccagagctgcagcgccctcccgtccccttccctcgaccccaagccacggcacattctcgaggcaacggtgcgctccttgggcggcgacgtggcctggcacgaccccaagacgctggtgcatgcacccatcaagctcttcgcagggccagtcccctggcggctgtccatccaggcccaaagttgcaactcgtgcccaatttccctgatgaagacttcctgagagcagagttaggaaaccgaccatcgcagattcaagactggatttgccttctggatagcgagcagtagtgcttgg

SEQ ID NO: 459024 - DNA, 387 bp, Sorghum bicolor
cgaacgcaaaatcttattgtctgtgactgatatattgtacataaatggtggcgcgctatcttatgcctaccaactttctgtactgaatagactgatattcgactatcagagcaagtcactatttctgaaactgtttccaggacaatgttaaatcgcagcttatcggagttgtcatgaagaagcttgaactctatcaacccaactgtttgtgcattgatcaatctagagcagaaatatttagggagccttttgcctttctactaatttttgcaaacatatggggagacttgttttcagtttgctatccatttctggctgcggagactggtcatactgaaacaacaagtaacaaggcaatgtaggcatgtgttctgtagctactttgag

SEQ ID NO: 459025 - DNA, 521 bp, Sorghum bicolor
  unsure (1)..(521): unsure at all n locations
cgtccgcaagaactgaaatagatggactgcacacaattagtttgtctgttctttattttgttcctaaaactgatacttttgtggtgataactataaccatcttgctcatatgtgcatatgtatgcaagttatttcaaattccttttatttctaatttcattcgattgctacacccatgtttgcattgtgatgttgagttgtttattcatgtgctatccaaaagtttttggtgtatccttgcgttcctgttctctgagcatgtcagcaccattcgtcttttgatgtggttttttgcttaacaaatactttttcttgttaattgtagatttctccaccaccatttagagttggcgaaggtgaacctccgccttcgtgggatccggtaccaactccagaaggtactctagaatatttagcttctatatgaactagatcaggaagcaactttgatttggctcaagaatgcgatggtctaacaggttagtatactgaactgctgaaaatntgatgtttttcttcta

SEQ ID NO: 459026 - DNA, 119 bp, Sorghum bicolor
cgtccgggcgcagagaatccccaggcgaacaaacagggtagtggagaggagaggagaggagaggaaggttgcgttcggacggagagaggcagaggctattttttcgatgaagctgtacg

SEQ ID NO: 459027 - DNA, 147 bp, Sorghum bicolor
cgtccgcccacgcgtccgtaagaaaagcaagaaaggggtagaggagacaataaggagtctattagtggtcactctgatgatcgtggccgcggcctgcatagacgcgccgcggggtgcctactgcgcgggctaatgcagggcgacgcc

SEQ ID NO: 459028 - DNA, 512 bp, Sorghum bicolor
  unsure (1)..(512): unsure at all n locations
cgtccgcccacgcgtccgcccacgcgtccggtgagaaccacggtacgcatgacgcgggcaatgtacgcacagcttgtgcagcagaactttcaggctcccagggggtacccgatgcctaggagggaggaagggccagagaaatggatggaggcagagctggggatgaagattgcctgcgggttcgagatgatgtaccaggagagaagacgccagggtgaggaaggtaaagggagcacgtgggaggtttacaggaagagcttggaggcagctggatgctttgaggggctgcttcctgggtcaatggagtataagagggtcatggaggatgcaatgcaatattacaagagctctaatttgtattcccgaacaagggagatactgagtgaaccagtgcggcgaattgatgaaatcctatcaacgccatactcggccgatgaatntaaaggcactgatctttcctctagtgatgatgactccctgttgtatggtgtggggatgatgagtaaatgcgg

SEQ ID NO: 459029 - DNA, 465 bp, Sorghum bicolor
cgtccggagagagagagagagagagggagagagacgaccaccacctccctccgctccctctctctgactcgactcgccccggggcggtgcgccgctccgccatcgccggcggcgaccactccgggtcttcggcggccccaccgacgccgggccccgcgacgccattcctccgatcgccgactcacgccttgcgctccgccccccccggcgagggtccgagctcctgcccagatccgccctgcgcctgctcgcggcccccgtccgcgagcgccgatcggcaggcggcgtaggcgctgctgcgcgagtgagcgagcgagcgggcgacggatccgtcgatccgcgcgcccgccatggacgacttccagggcctgctggcccgcgacttcggcctccgcccgcaggggaaggccgcgcccatgtcggctgcgcgctcttcggggcccttcggatccgtctggaccaata

SEQ ID NO: 459030 - DNA, 472 bp, Sorghum bicolor
  unsure (1)..(472): unsure at all n locations
cgtccggaaatatgacaccagaagcagctttggatcatgcgaggtctgtgaggcctagagtgcttttagcgccagctcagtggcaggcggttaaaatgttcagcaagctcaacgggagatgcctttccatacagagctcgaacccaacctgctcagtactatcttatgaggaatccagtgaactgttgagcacgcagagcagcagatgcctttcgattcagagctcgactgaagactcaatagcatctgatgaagaatccagtgaagcatcctttgtagaccctgaagttgatggctacgccgccactgagtttgacagcgagcattttattttacctcgttgtcgaagtatgctgtccagaccaacaagccccactggctgtagcgatgcagtcttcgtaaccggngaagatctagagggctatgagacctacgccgatgacgggaaaggacgtggtgagtgcaagtagtg

SEQ ID NO: 459031 - DNA, 269 bp, Sorghum bicolor
cgtccggtgaatctgatctgtcaacttatatgccctatccagcaacatcttgtgcactacaaagagaagagcgtgtcccatgtataggagcgtggttgcacatgctcgagtgcagatctcatcatgacgaaatatgatgtaccagtctaaggttatctcgagaatgactcactgaccgtgaaatgcacattatctgagctaggacgagatgaggagcatgccattgcagaggcacaaaccttggacatgcacaaacacttaggtgagct

SEQ ID NO: 459032 - DNA, 455 bp, Sorghum bicolor
  unsure (1)..(455): unsure at all n locations
cgtccgggctgaccccacctccgcactgctctttcccttccacctgggcccccacagcgttccccttcccgtcaccaccaaaggcccgaatcctttagggacgagcgaggaggtaattcgtcgcctgatcgatcggccgatccgccgccgctgccgccatgttcaacaagatcatcaagagggggaaccgcaagggcgcgcgcggggacagcgcggagtccgccgcgcgccccgcagcgccctcgtcgttctccgggagcggcggcggctgcagatcggggggtcgctagccccttaccagcaaccactctttccgcgcacagtgccttcgacgcatttgtccacttngtcatatattccgttttttgatctgggtaccaatcatttttttttaatttttttctatttcttatttttgctctatttttttttttgtgtcgtctatcttgtatttt

SEQ ID NO: 459033 - DNA, 240 bp, Sorghum bicolor
gtcgaccacgcgtccgcggactcatattccaactcaccttccgtactatatattcaaacaacatcctccctaactatcctaacttaacaaccgcagagagagggtcctatccatccggaatttattccgacttccccaactaactcttgacttctacgatctatccgaaccctacgacgcctacaatataccactactaataactttcttttactaatcacaaacgtttcaagcacacca

SEQ ID NO: 459034 - DNA, 102 bp, Sorghum bicolor
cgcaggcgtatgccctagcaaatgccattctgtctgtcatatttatatggcatatggtcataaacataggtctgcaaaaaaaataaggaggggcgggaccta

SEQ ID NO: 459035 - DNA, 429 bp, Sorghum bicolor
cgtccggtgatggaaggcctgaattgggaggcggcggagacggaaggagagcaaggccaccaagccatggatttggagatgacgacgggggggaaacaatccagaggcatcggctgcgttctcgatttcatcgaggagaatcctataggggtgacaatcttcccggcttccctcttaccaccgctccatgctgacgacggtggtgcgagaagcggcggcggcggcggctgtgttctactcgatctcaaagcctacatcgccgacttcaccaacgagacgaccgccaaggatttcacaagcgccggccacgagatgcaggccacccttcgcgtcgcctgtccgccacgcgtttcccacctctgcatccactgccccaccctcaagccggctgatttcgggacggagcccgtcatcctcgccgcgtgcgac

SEQ ID NO: 459036 - DNA, 314 bp, Sorghum bicolor
cgtgcgcccacgcgtccgaccccatgtgcagcggcgagcctctaccagccagcctactcgggacctcgtagtcgcagtagcgcggcggatcacgcgcacctttaccgcacgccgagaaggatgtcgtcgtggtcgtcgccctcagccgccgccgccgccaacacgggcgcccgattcggccccttcccttgccgaggcgcggggttcgcgccgtatccgtcgctcgcccggggagccctcgcctcgccgccggtcgtccttaggccccaccctcacccgggcggtcgtggccatggccctctcgcgcgcaccgg

SEQ ID NO: 459037 - DNA, 51 bp, Sorghum bicolor
cgtacgctgactatgctcgacaagaatcctacacactctacaatgatatgc

SEQ ID NO: 459038 - DNA, 468 bp, Sorghum bicolor
  unsure (1)..(468): unsure at all n locations
cgtncgcgtaggcctttctaacaaaaccaaccccccgccggacccccgccgtcggatgcaacggaaaaggcgtaattggcgtcctctttggcgggcgagccaagttccggcttttttgatcaaccgaagaggtcgtccttggaactaaaattcatggtgctcctgatccactggctgttcgttgcccctgtcttcatcctcgatccgaccctcgactggcgaatccacgaggagccgtggtttatagggttgtatggagtgcttgtcctgctcacgttagtgcaatacttctacacagctggttcatcttcagggtatgttgttgatgtaatgagagctggttccatgatgcatgcaaccttcgtcaacactactgctctttcaaagcagtcaaattcaagaaatggaaacacaggttccccgacgagtcgtgctcaactacagaaacttagcacgatgactcctaca

SEQ ID NO: 459039 - DNA, 456 bp, Sorghum bicolor
cgtccgcgtaagtgtgagattgacttctagatcgatcactcaacactttaccaactacccttcgaggaggacatgatcgaggagcggagccattataaaatgcattgctaaacagccgtctgcaaaccactcaccgagccactgatcgtcgaggataccgccaaagattacgcgatcgccttcaagatcatcatcacgttcatctgcaacacactttgcaacacatataaaacttacgggaaagctaaatttgcaccaatattaccacacatatcataccacgaagcgtacagcgtagtggagcacgtcgaggagtacgtcgagggctacaccgcggtccacaccttgctgccccagttcttgcaccactgctcgtactcctgcaactacaccaacaagcacaactacatgtccgactcgatgccgctcgtgatgcggcgcgacatgaccaccaac

SEQ ID NO: 459040 - DNA, 433 bp, Sorghum bicolor
gatcaattcgagatagccaatagacctagggcaagggaagagccattataggctgagtgcaaagataattacacaaccatataatatcatccgattgcacaatgctaaaaccccaagacactagcagacaagttgcaaaccaatattccatccaccaacgcagcacaacgtgccccagacaacaccctcaccacctaatagaaaccaaactcgagatatcaacatcaacatctggcctgtgcggcacaaccaccgacataacctctaggcagctcaatggaaaatactgcatcaaccaaacaccaacatcagcaggccagaaatggccaccagccagttttactgctgcttgcactccgctggttgttcagcatttccttgcgacaccttctgcggcccctatgtttgcgaccagatcccgacttccgtgctg

SEQ ID NO: 459041 - DNA, 336 bp, Sorghum bicolor
cgtccgagaacctactcgtacagatgcacacatcgttcaagttcatatctgataacattctatcaaatattgatcaaatggcgaccgagttctattatcttgatcagagcatcaacaatcttaaagctaatatctacactcatataccctccaataagcctgatcacccaaatccttctgactccgcttaacttgtatgtaacccataaattattgagtcaagattttgtaatagcatgacaaatttcagcattctgtgtatcttctgagtatcatctgatccatgagtcctgtcaactatgtacacactaatccatcatgtgaatgattaattca

SEQ ID NO: 459042 - DNA, 157 bp, Sorghum bicolor
  unsure (1)..(157): unsure at all n locations
cgtccgggctcatatatagagagcgcacacgcaccacccctaggttccagactcccagtacccacccaccaatcctactcatcatgcgcgctgcgccccttcgacagttgccgcacgatccgnccatatcgccccgccatggacccgctcgagacga

SEQ ID NO: 459043 - DNA, 519 bp, Sorghum bicolor
cgtccgcaaccattttcagtcctattacctgcatggatcatgtcaacttgagacccagctatcatgctcgacaaatttgtgcaatagatcaggctgtttttcatgcagatcctcattttactgcaacagccccaatggcatataggacagatgtcaggcagttgccaaattctgaaagaacaaaaattcattattatacaactccgagcaacaagtatccatgcaccaaacagcaagagctttcgatggagtgtttttgctctgaatgtttggggcatcataatccagagcagaaactacttgggatgcgaaatagctgtctaagccagaactttgggcaggacacccaacacaatgccgaaacaacaatgcgccttatgggaaaaacagttacacttgggaccagcagcattcattgtagacgtctgaatattgaaactccatgttccagtaaacaaagtcaagctgaaaatcagttcttccagggaacacgtaccaaagttttccacaattgttcat

SEQ ID NO: 459044 - DNA, 416 bp, Sorghum bicolor
  unsure (1)..(416): unsure at all n locations
cgtccgcgccacgcgtccgcccacgcgtccgggctccacggttgccaaccgtggcctcccggcattgatgattggaggagagctggagagtggggtcttcggcacaggtgcctgcgccatgggaggacgccaagaggaagaccaacaacggccgcacgatcctgtgaggttttctcctgtttttttgtttggttggtaaccttagaggagttccgtgcctcggcttgcccatcattcttttagccgcagctgtgcatgcttttggtggaggagctagaagctctgtaagatgctgaagacctgtacatagctcgatcgatgcttctcccaaanaatataaaaagacactcaacacattgcctaaacaacaaagctgcttatgggaaaatcagtatatacttattaccaggggcggc

SEQ ID NO: 459045 - DNA, 106 bp, Sorghum bicolor
  unsure (1)..(106): unsure at all n locations
cccgtccgcagcgcgccaggcgcagtcgcacaaagaggcgagtgggagggctnatggctcaggagggggaaggcgctncggcgaaggggcaacctgtgtaggccga

SEQ ID NO: 459046 - DNA, 278 bp, Sorghum bicolor
cgtccgcgcacgcgtacttattcacatagttcgtaaaactacgggctgtaaagtagtttgcacatcgacacttcaagcccactcacaaagccaggacgtctaaaaccagctcaatcaggacggatcactctaacagtcttcatggctcaacagagtgcactgttcgcacatcagtaacagatataccttgcagagttgcaaaggaaaaatgagaggctggcacatacgctcagactacagaaagcgttgaatccacgtccaaataaacgctggttgaa

SEQ ID NO: 459047 - DNA, 525 bp, Sorghum bicolor
cgtccgctggtgaacaaacagaatgagagtgaaaacatgcaggactctgacaatctctcgatgctgacttccatgactacaggaaacgcaggcagcgtgtttccattctccaaacaaaataatccttttgaagtgaccagctcaaggccagagtttggccttgtttcatcagactcactgatgagctctccacatagttccttggagaatgtgaatctgctcagctcacagagtctgaatgaacaccagagttcagccaccctgcagcactttgtggactggcccaggacacctgcccagggaggtctttcatggcccgaggcagaagacatgcaagctcagagatcacagctctcaatatctgctccaatggcatcctctgagctatcatcggcctccacatctcccatccatgagaagctgatgctatcacctcttaagctgagccgcgagtatagtccaactggtctcagcattgcagcaaacagagatgaagttagccagttagaagcaacccgggcgaca

SEQ ID NO: 459048 - DNA, 334 bp, Sorghum bicolor
cgtccggtctagggctactagtccgccggaataacacatgctaccagttacaccggttgtcgccgcacgccgtgccgacacaggcgcggcgagtggcgtcgaccaccggatcctcctcataatacgctctatatccttctacacttcttactggagcactctcataccgtgccggcgattcatgcacatgccgcacgagtgcacattcaagcgcactctactaccgacggtgggacggaactgtgcggtggcagcaggggacggagtactggatggataggcatagtcattaacacaggtgtcagtatacatgtcatgtgcttgagcacaccat

SEQ ID NO: 459049 - DNA, 277 bp, Sorghum bicolor
tcaatgacgtgtgtctatcatgcagacgacatgtatcttagtttctgagatgacagcactgtgactagctcttacactcaatgcgatcacgtatctcatggtacgtgaaagctcttcatacttctgatgagatatatggcgaaggatgagtatttagtgccgccatactagcacctactgctgaagccgatgttgtgacgatggttccagggacgtgtgggtatctagatcctgaatatatgcaaacatggcctgctgacagacaatgagtgacgtt

SEQ ID NO: 459050 - DNA, 51 bp, Sorghum bicolor
cgtccgcccacgcgtccgttccgtcgtcgcgacgcctctacgcacctcccg

SEQ ID NO: 459051 - DNA, 125 bp, Sorghum bicolor
cgtccgctgaaggcgagggttatctcgtacctcccccgcaggccgcatccgagcgcaaacaaaactcctctccgcgccggccctgcaccggcgaccgcgcgcccatggctgccttactccgcacg

SEQ ID NO: 459052 - DNA, 56 bp, Sorghum bicolor
  unsure (1)..(56): unsure at all n locations
gacccacgcgtccgtgagctggtagcacanaagctggtggacgtgaagaacaacca

SEQ ID NO: 459053 - DNA, 99 bp, Sorghum bicolor
cgtccggaaggtttatccagaaaacaggtgccttctctggaacacaacaaccaggtgaaaggagagagcttggatttggttaagtacattgacagcaac

SEQ ID NO: 459054 - DNA, 199 bp, Sorghum bicolor
cgtccgcgccggctccgcctgaagcggccgtgacgagccgagagagctagccgaggactaagcacaaagcaagagagagcgggaggcgaagctgaatcgacgactgaaagaggccgaggaaatggacgagtctaagcgcaccaccgagcaactgcagagacagaccatcctcgaggccccgcaggagtcagaggacgag

SEQ ID NO: 459055 - DNA, 318 bp, Sorghum bicolor
cgtccggtggcccaatgccggtcataccagataaagatcatgagttcagctaacatagtcagggacgaggtactcttgggccaagctctagatgtaaatgatgaattacatactctgctcgagaaacatgattcgactgcatcaggttctactttatcttctgatgtaatagatgttatcagtgaagtgccatcaagaatggctctagacctatgagcaaatgttcctccacaagctgcagtttctacaaccatagtaccaaccaatgttttgaatgacgaagatgaagaaaatgaggatgacgaggtctctatgcta

SEQ ID NO: 459056 - DNA, 101 bp, Sorghum bicolor
cgtccggaggtgggttggcttctcctccccctccggttcggttcggttcgggttcgtcaggttcttcgggggttccggttcgtgggtgaagcggaagagat

SEQ ID NO: 459057 - DNA, 274 bp, Sorghum bicolor
cgtccggatgaggcatgtgttcgtccggagaggagcgactactagcggctcgtctgggcgtgcacggtggaggagcattacgccattggcaaggagctgtaccaaaggattcgtgagggtggtgatgggggcgagatcaacctgtccgtgttgaaccaccttatctggcttatgggcaaagcgaagaaatggtgggcggctctcgagatctaataagatttggtggacaaacgcccgaagcccgacaatctggctcatgagccgatcatgtcac

SEQ ID NO: 459058 - DNA, 215 bp, Sorghum bicolor
cgtccgggatgtctcagtgaagtggaggatgtctcagtgaagtgaaaagcctcagtaatgtttaggggtaactacaactctttttgttaacttgatgaatattcaagatgttgagagggctatgttctttgtcattttggacttgtgacttagatgtagcgtgatgtatattgctacctggatgtatgagtttgacaatataattttttacaaaa

SEQ ID NO: 459059 - DNA, 448 bp, Sorghum bicolor
  unsure (1)..(448): unsure at all n locations
cgtccgcccacgcgtccgattgagctatgggaaggtctcataattttagacctttgtatctaaggctcctcgtgttactacttcgaagaaaacttaatgttcaatatattcttgcaatgaatgcaactgcgacaactcaaaccttgaagagaatgtggtggctgcagaagatgtcatggatgatgatgatgacgaggatggtgcactggaagcacttttcaagcagctggaagaagatcttgagaatgatgatttatctgtggatgacgatgatgatggtatatcagaagaagatatggcaaggtttgaaaaggagttggcagaagcaattgaaggtgtcagtggtgttgatgaatcagcaggggattctttgatgagctctggggactatggtattgatgagcaaatagacagaagcgaacggncagagctgaaaacctggcaactc

SEQ ID NO: 459060 - DNA, 431 bp, Sorghum bicolor
  unsure (1)..(431): unsure at all n locations
cgtccgaaagctaaatatgatgccagtaaaatgattgacacacatggccttcaaccttttagtacaaattttcctgtgtgtggtcaaatttacacaattcctgngaacattccatgacttttaggattttttttacacaagaattcctaaatcactattattttcatagagaagtgttttagaaaattagtttccatacgagtctacttgctgctctgtacacacaaccatntaacttgctgctccaaatgtgctatccaaacatagcaaccatatatttttacaattaattttgcctacaatgaanaatagtatgtgctgctttcggtaagcgccgatcatagtactcagatgatgcctagccatatcaaaccaaatttggacattctctcctttcatgttagtttctaacatatacttgcttactggac

SEQ ID NO: 459061 - DNA, 93 bp, Sorghum bicolor
tcacttgcggtgtgcttagcaatgcttgttgactgacgtgcatggtcacttcacagattgactcattcttctgagcaagctgttattatcttg

SEQ ID NO: 459062 - DNA, 80 bp, Sorghum bicolor
cgtccgtccacgcgtccgaaaaaatcctttcccttttcttgtgaagtcgtcctcttcttcccgtcgcttcgccgtgccgc

SEQ ID NO: 459063 - DNA, 53 bp, Sorghum bicolor
cgtccgcgcagaccgagcagcttgccttcgagggctacagggggcgctgcttc

SEQ ID NO: 459064 - DNA, 255 bp, Sorghum bicolor
acctcagttcttcgcgtctgcgtccgtcctgcccgacggtaccaccctgtccattggggagttccaaagctgactctctgagaacatgcggcgggccgtgtcgcgaacagctcctctcgcacatcgaagagaggagctcatggaaatacgaggggcctctcccgtccggtcggtgcggatgttcttctacctcgcgttcatggccagcggcacgctggggggactcatcgcgctcgcgcgggtttcttccggcgc

SEQ ID NO: 459065 - DNA, 232 bp, Sorghum bicolor
cgtccgagctaggttaagtcagtcagccagtcagtggatgagccgagagttcattcatgctgagactgagagggttattatttgtgatattttttctcttctttttttttcctgattttgtatattgtaatatccagctggatttccaatgaatcaacctgtataataccagtattaattatgaatcatgctacatgaatgagtgaatgaatgattatcttcaccaccaaaa

SEQ ID NO: 459066 - DNA, 128 bp, Sorghum bicolor
  unsure (1)..(128): unsure at all n locations
cgtcaacggcgatgacttcaccgagaagagccgcgtgccagacccgcagaggatgatccgcgcctacgcgcagtcgcaatggcaatggcaatggccacggncaagctcgtcctcctgatggtcctcgt

SEQ ID NO: 459067 - DNA, 230 bp, Sorghum bicolor
cgtccgcacacacactcacacacgtctcaaactgacggcgacgatggctgtggtgagcaggaagacgtcgacgatggtggcagcagtggccgtggtggtggcgctgctgctggcgtcggcgtcgtctgcgtcggccgcgatcacctgcggtcagtggtgacgcgctgcgcctgcatccgtacgcacgtagggcaggcctgcgcgtgtctgacgctgccagctgacgcagc

SEQ ID NO: 459068 - DNA, 70 bp, Sorghum bicolor
atcagcgacgagctcgccaagtggtatggtcctgacaggaggatctacctgccagatggtctcttggacc

SEQ ID NO: 459069 - DNA, 77 bp, Sorghum bicolor
atgcgccattgcttagaagactacagtgttggagaaaagctaagagtgctaccatgtcgacacaagttccatgcagc

SEQ ID NO: 459070 - DNA, 216 bp, Sorghum bicolor
gtatctgcacttacgagctatatggaatatagtatggagaagtgatatcatgaccaatgtagctatgctgatagagagctcgagagaggagcaggaaactttgatgatgtttacgcagatgaagcttttgcagatagtatttcaaactgggccgatgttgtaaattgcatatgaacctggttgggctattggaactgggaaaagttgctactcctg

SEQ ID NO: 459071 - DNA, 490 bp, Sorghum bicolor
cgtccgggacatgcttgattgattccttaccacttgataaaactgccaacataacaactgcatatgtcgtgcacttatatgagcaaaagcaatcttatttactatgttatatacttagcttctgtacttcacttgaaaagcaattttctgccaataatcctaaaagtatatttgttgcaatgttgcgagtagttttgagctgataaaatacaagcatgtgatttggtttgcatctatgtatgatgatgtgctctgagttggctaactataattgtacactttggttgggagattcatcactatttaatacagggacatacttctgcattaggttgtcttaaaaatgcagtgtagagcatgtaccaaaatttttattagatagaattgaagtttagtacataatatagtataaaagggtaaccaaggtttttgttacaaagaaaataatctgtgttctttcttaggtgttatggattaattgggtatataa

SEQ ID NO: 459072 - DNA, 115 bp, Sorghum bicolor
cgtccgatttagaataaaatcagtaccaaggaatcaactattataataaactaggtagcgtgtccgtgcgttgctacaggatagctaacatttttattaaataacacgtatcgac

SEQ ID NO: 459073 - DNA, 81 bp, Sorghum bicolor
tcgtcgaccacgcgtcgctccaatctggccccggcagagcgccatggcacaccattgcgctggcatccaaggcggtgacag

SEQ ID NO: 459074 - DNA, 339 bp, Sorghum bicolor
cgtccgcaagtttgggagaggtcctcgggagcttagtggtgctgtggacttaattagtcgctacaagctgctgaatcatcatagtttcttttgcaagaaacctttgccattggcaatttcagatacaaattatcttaacaatgttgtgggcgacacagaaattcgtaagggggaagggatggagttggaccaactctttcagaactcatattcaagtgagaagactgcttatattcagccatttgacatggaaacactgggacaagcatttcagctgcgagaaactgcaccagtagatttgccttctgctgaaaaaggtacaccaaccatatctgggaa

SEQ ID NO: 459075 - DNA, 272 bp, Sorghum bicolor
ttttaaaatcacaggagacaacactatcatggaacccactgacgtttaagtgagatttataaccaagacaaacattcaaatgatgatcattcttaacaaaggttcagactttcgacaaaagtaccactaatatagcaacttcacacacccatgagtgaaaactcagaaactgattaggccagaagacttcacacggtccaatggctaaacctatgggcgagcagcaactggtgctggagctggagcagcaccagcaggaccaggaccagggc

SEQ ID NO: 459076 - DNA, 164 bp, Sorghum bicolor
acgcgtccgcggacgcgtgggtttccgaacgctccacaggggatcctttgcgccaccgaaaccgtgtaaccccggccgtgccgccgccggcaatcccaatccgccgacccaaccggtccggtccccccgttggaagccatgtcgccgtcgaacccaacccggaa

SEQ ID NO: 459077 - DNA, 387 bp, Sorghum bicolor
cgtccgatctcctccgaagccttcctggagctgtgaatcgcgcgtgaatctcctggatttgcagactcgaggggaaagctgagataagagatgggttggggaatatccaggttgattggactgaaggctgctgtcctgctttctgtggcgtgttttttccaaggactaggagtgacccttatctcatttcctctcatatatgcatccgtgattgcaatactaatctcgatagcttcccacccatcgattgatcttcctttactccttggcaaagcatccgatggaagttttccgttgtggtcatggatcatgttctcaccatttcttcttttcattcacctgtttgtgctgctacgaagatttgtgaaaaatgagcctttatacact

SEQ ID NO: 459078 - DNA, 392 bp, Sorghum bicolor
  unsure (1)..(392): unsure at all n locations
cgtccgcttggctccgcgatggcggtgggttgcttcaaccccgtgctctcgccgctcgttccttcgccgccgggtaggcgcgtccgagcggcgctgcggtctcagtctcaccagccgaccgcggtctccctccggctgctcccgtgcggcgtggcagctggtcgtggcacgcggcggctcgtggcggcggcggcggcagagtcgcaggccgtgcaggagcagccggcgcggacggaagagtccggtgaggccggcgggggcggtgccgccgaggcgtcctccaagctcgttctggtcgttggcggaacccngcggcgttggggcagttggttgtaagcatcgttggctaagcagggnacccatcaagtcaagaattgggctcctaaagagat

SEQ ID NO: 459079 - DNA, 55 bp, Sorghum bicolor
cgatgctcaggcgtctttctcgggcgcgagcggggctcgcgcggggccgcgtcgt

SEQ ID NO: 459080 - DNA, 293 bp, Sorghum bicolor
cgtccgatcaaacttacctatatgttgacatatgagagtgcaactgaattgctttacatgaacctggaagaagaggaagaactaaggatgcttcaagaagctgcttccattcgtgctcagtggcgtcatagccagggttcaatagacactgcgatgatagagccacgtatcaaggtgtcaaatcctgatgatcctgaaccaaatatcaatctatatgttgaagatcaagccaatccagcaatgcagcttgtatctgaaatgatgatactttgtggccaggcaatggctgtttt

SEQ ID NO: 459081 - DNA, 209 bp, Sorghum bicolor
gccacgcgtcgttcttcttgtgggtatatgtgttgggtcacttactgcttctaccgagatgaagactgcagaatgcaatgcaaccgaaggggcgtacactggctcctgtcaaagatgccctaatcaaggggcactgtgactatatagtctagtcctgaaatcagaaacagtagctcgggtgtaaagctagagtgttacatatgcacgtg

SEQ ID NO: 459082 - DNA, 115 bp, Sorghum bicolor
gcattctttatagctcaggaagaacggggcagtgcatattatcaggtcaccgttcatacgaggctgagaggatctatatgctcttcgtcatcttacatacatagtacttgaccag

SEQ ID NO: 459083 - DNA, 484 bp, Sorghum bicolor
cgtccggtttagttttcaaagtcttcacttggaaagaaacagtatccatttctgttgcgaagatccatggacataaacagcaatagcatgttcgcttccagcagggctacacggcatggacaaaccactcggcaagaaccaccatcggcagcagaacatccaacctgtaaacaatgtttatctaaacttcttgtgccatgctatcgaatctgtgaaatatccatgcaatatatagtcatgttaccttttattatttttagaattaacccatatatgtaatatatgtgtgtatgtatatatttaggatgccttcagttcatagttgtacatctcatcagaatcactgcagcacaactccgttatatacacactgtaaataggacttggttagaacattaaaataagtagaaaggcattgggttgcaacgttggtttgccaagacatagaaataatttaggatgccgctcctcaatcatgactatg

SEQ ID NO: 459084 - DNA, 322 bp, Sorghum bicolor
cgtccgggcggcactaaccaccacttaaccgttgaccagccggccaccggagttcctgccgcgaccgcgaatccggcgcaatggccgcggcggcgatgggcctcctgcgtgagctcctgcgaaccacgggcacccgccggttttgcggcacggccgtgggcgtggcggcgggcttcctcagcgccgcgaccgtcgcgtcggcgtccgacggcgccgcctgcccggcctacccgtggtcaccacaggacggggcgcgtggcggccacaaggtgttcatgcagcacgactgcccggcgtgccactccggcctgccgtacgccgg

SEQ ID NO: 459085 - DNA, 333 bp, Sorghum bicolor
cgtccggacgacgacgacttcacgggctcattccccagttcaggcgatctccactgccgccgcctccattccagttcagcagcagctctcagcgtcgttccttctcggccctccactatccgtgtgccggccgtactcatctcctgcggtccctacctgggtaaaatcctgcaaccggctcatccgccgccacgccgggtcgctgcggagcgccgctgtccttctccattcccctccaacaaagctatccaaaagcgaagagttgttgttgtttctcggaccctgggcgtgtccgccgcgatgggtggaggcgtctgggttttccagttggtt

SEQ ID NO: 459086 - DNA, 384 bp, Sorghum bicolor
cgtccggcttcataattattgattatccaagttccaagcttgcagggaactagcaaaaaacatacgggcaagttatctagtctataatttttccatatctctatgccacaacatactgatatagcagagtctgctggaggtctagctgtagatgccatttgcaagtgtgacatgtaagtgttattcttgcaggcattaagcagagcagttgctaggctagcctgactaaggcatggttcagggaagttatagaagaagagtcctcgatgacctcttcccttgagcaagtgcttcaatgcaattctgaaggggagttccttgagcttgtgactatggccttggatttttgccactgaactgaatattgaaatatgaattggcaag

SEQ ID NO: 459087 - DNA, 515 bp, Sorghum bicolor
cgtccgataacagcccatgccgaccggcctgcttcccagcagagaccagagcttcttcttggccttctctgcttctctgctctagttcttgaatccagaattcagttagggagattgttctttctcaccgaccgggagatcctgaaaagagacaacacacggttgggaaaaaggggatcggcatgaaccttcaccaagacatggacagggagcagatgaggatggccatcctgaaccaagaacagatcttcagacaacaggtacacgagctgcaccggctgtaccatgtccagaagcagctgatgcagcaggcacagacgactgctccggcgagccgtgctccggcggcggtcgtcgacgtcaagccaagacccgagcttgacatctggtgcggcgagaaggcgacaacaactcctcagcagcagatcatcagcttcaacaaggccacaacacctgcaatggccgaggaatgcaaccttgagctgacactggcaacgggaccgagcagcaacagc

SEQ ID NO: 459088 - DNA, 417 bp, Sorghum bicolor
ttttaatccagtataatcaataccacaatataacaagtttgcaaatcttgcttcgttgacagtatcgacaaccaaacctcataccgatacagctttcaataacgcttcaccagctagagtcatgcatcgcgactaaatgatatgcttacaggaacttattaacaaataccacaaggggagcatcctcatcttcaagagcgacgccgagttcgaccgaaggttcacggccctccacaggttccttcaaaggcgaaccagcttcagtgagcccgctcccggagaacctcaatgtccacctgtgtcgggtcggtcgcgcaatgactgatgagctgcagcctgcagcatcagggcctaacataggaataacaccgggcagacagccgaccccagcgcgcgggcggatgcacaccgctggcg

SEQ ID NO: 459089 - DNA, 422 bp, Sorghum bicolor
accacgcgtccggcactggaatcttatttttctaaactctatcccactccacagctatactctttacctcagaagaagcacaaaagtggtcaatcatcgtcaaatgaagttgatgaggatgccaatttcaagaacagggtagactctttgcaagtacagattgttagaggaaacacaggtatcaagagttatcaaagtctcctggacatgcatacagatgatcaagcgtctggtttctatttgacttctgttattcgaaatagcaagtccagtgaaaagttctgaaaatgaatatttgtctctccctttgttgtatggtgccaagataaacaacttaatactttcaggggagtggtggagactactaacaccaatgtgcctggtattgcttctccctctattgctagataaagtatcacaaa

SEQ ID NO: 459090 - DNA, 259 bp, Sorghum bicolor
cgtcgcgcccacgcgtccgcccacgcgtccggaaagggggaagaagggacgaggagcccagcatgccgttctgcagtttatacgcctccacgtccgtccccgtcgtcaagccccagcagtccgtcgcctcctccaagcccccctccacggcggcggcctctgtgactacaactgtgccgatgcgcagtgcgacgacggcgacggtaacgacggccgtgcccacagcgagccaaacgctgtcgttgacctgccgagctgc

SEQ ID NO: 459091 - DNA, 407 bp, Sorghum bicolor
cgtccggtcattgttaggccccacggcgacgccggcctgaccagccgcatgatcatcattttcacgctacggcggttcgacgtgccgacgtaggcaaggcctgctttggcgtgaacgttaaccctgtcagcagcggcaggaagtccatcggcaccacggtcggcgttagcgtgaaagggggagtcctcgttaaggtcaaccctggctatggtaagaccggctgcacgacggttggtgtctggaagggcggagttggtgttaacgtcaaccctggctacgggaagcccggtggcaccactgttggcgtctggaagggcggcgtctgcgtgaacgtcaaccctggcaagcccggcggcactacggtcggcgtttgcaagggcggcgttggcggcgacgtcaatcctggc

SEQ ID NO: 459092 - DNA, 178 bp, Sorghum bicolor
cgtacgcatatgccctgcccctcctccgccctcctgcccattatcgactcctccgacgcgcccagcgccatccggcgagctccaccgcaccaccggcggcagcgaaagtgcgggggctgagtctgtaggaggcggcggcggcggaggaggagtgagcctcggtcggtgctcatttacc

SEQ ID NO: 459093 - DNA, 255 bp, Sorghum bicolor
  unsure (1)..(255): unsure at all n locations
cgtccgaaaccctccgcgcgcacacggggccgccctcggattgggctctccctctcaccgccagtcgtcaccgctcgccgcccacaccctggcgcccatggcgtcctcgctcgtctcgcgcccgcacctcacccagcgcccggtccgcgccgtcacgctcgcctcccctacccgcgcccgnctcgcggtcggggccggggcccttggtgggcgcggcgtgcgctgccaagcgcatgcggcggtggacttggacgc

SEQ ID NO: 459094 - DNA, 348 bp, Sorghum bicolor
  unsure (1)..(348): unsure at all n locations
cgtccggtgatattaataggcatataatcatatgaacttttgcatgtatgtttgactaaaatatgcatttgcgctcttccattttgttgtcaaatttcaatgtttatggttacagtatgctactctataaaactttcttgaagtcgaggtcgattatcttatttatttagtccatggtgtaatgtgttagtctttgcctgtatagttttgacttgagtacagatggatggagtatcatgaccctgattctagtcatcatttctccacttatatgtgttatgttgatgtttgtctttcatttatacattcaacattctatttatatantaaatgatggaatctttcaat

SEQ ID NO: 459095 - DNA, 382 bp, Sorghum bicolor
  unsure (1)..(382): unsure at all n locations
cgtccggcttgctttgcatgcattgctgcggactagctaggaccgtgtcactgcatgcccccggtctggttcttgctcctgattctgctccttgtatggaagctgccacaatcagctacatcagctagctcatcgtacgttaagcatgtctgcagtctgctccttgctcctcatcctgctccttgtatggaagctgccaccggatacagcagctcatcgtcaagcatgtaatctactgcttccaccatggtcactggtcaggatcagaggtgaatgcatatgcatgtttgatgctgatcttaccatccttgatattggtagtatggatgagggagactnttatgttaagtttcagctcagaaacaaagtggatggtttcaat

SEQ ID NO: 459096 - DNA, 435 bp, Sorghum bicolor
  unsure (1)..(435): unsure at all n locations
cgacccacgcgtccgcatatggcgtgaccgtactcagccatagtgggcactactatggctgacaagagacagtggacatcacatgtggcataaaatgtgcacatccatgcatcattgatgtactgatactgctcattctaaatgttactgacaaaaccatcttgatatatcaaagcaagggcgaaagacacgacggctaaaaagtgcagtagctagccctcactgtcatatcaaaatgaaaaggagaggcagatggtaacaaatggcgcaaagatgggagcattctcatctgcagctgctgctggacagatcgcaacactgatagggccagacagagaactctaaaccaacagctaaactctgatgactttactgttgcatagatctgcgctacactactgatgagacacgnctaggaacacatcgaactatata

SEQ ID NO: 459097 - DNA, 57 bp, Sorghum bicolor
tgtttcttcctccttctctttttgatctctacgcatcgcgagcttgaaccaacaaga

SEQ ID NO: 459098 - DNA, 70 bp, Sorghum bicolor
cgtccgaaaaaaaaaaaaattaattaaaatattaaaaaaaaaaaaaataaataaaaaaaaattaaattat

SEQ ID NO: 459099 - DNA, 396 bp, Sorghum bicolor
cgtccggttcaatgacaggagcggctctgggtcagccatgggtggttttggtgcgcttagcgacaagagcagctcagggttcattggtttatatgattcttcgaatgatagtataaatcagacgctgggtaatgtggcacgcttccaaacagatgatgacagcagcgaagatgatcagtgggaagaggatgattttgacttcaggcctgatgtgacgtataggcgaggatcgacttattctgttcgggaccttgaccttacaagacctgcagccgcaaagaatcctcctagaccacagtttgaaacaactacagcggaggttttgaggaaggctgattctaggaacgttagattcctctcccactttcttacggaagctggaattatcatcaagag

SEQ ID NO: 459100 - DNA, 548 bp, Sorghum bicolor
cgtccgaaacattcaagcagcttcagagtgaaagaggtgaaagtattctcacgtttgccgtagacatgacactgaaatcaaccaaagccttggtgcagccaagtaacatgccggatggtcttgacttttggagatccaagttactatgggcctcacgtgtgctaccaatgccgctcgttgggctactcgtcatcactgggctgtgtctgccagtggaaaaccaagatggatttcctgagctggaggcattgtctaggctagattttggagctgcactgaagattttcttggcaaagcaactgacatctgagttcacagctgtgcctacacccgttgaggagaaatcagttatcattggtgagaggaacagagttgctactgagaagattaaggaagcaataaactgtgggtacaagagaattagagtcctgtatggcggcggacacatgccagaccttggaagacgtcttcgagaagagctcaatatggtcccatccgacgtgcagtgggtcaccgcatggtcaataagaatgccggagatagacaac

SEQ ID NO: 459101 - DNA, 466 bp, Sorghum bicolor
cgtccgctcgcctgcggcggcgccggcgaccagcgaccagcggcgatgcgggtcgcacccaaggtgctcttcctcgtccgcgacgccgcgggatacggcgcggccctcgccgactcgctccgtccgcggaccgggctaacgagggagtcctcgcccttcgagcttgcccttgacaagtacggcctccacggagagaaggcgtccggcgagctcctgagcttttccgattccaatggctctccacaggtgtccatttttgttctgccagactataagccccctcttgcagcgtgtgttgtaaatgaggtcttggaactgatttcttctgaagctacctccactgagcgaattctaattgtcccattcatcacaagatcgtcaagctatcatcgtggaatggaacatgcgacaaaagcatcgcctgtacttcatggtgctgaaataggggcaacaactgactatactc

SEQ ID NO: 459102 - DNA, 483 bp, Sorghum bicolor
  unsure (1)..(483): unsure at all n locations
cgtccggaaagagaggtgcctttgtcagagaacctccttcaaactgaaccaggagagaatcaaattcccaatgaacaggatgaaaaggacaaacaagatgagtttcaaaccccaaaagaaaggaatgaagaggacgtgcaagatacagaatttggagaggctaagaaagaagttgaacaagaattacctgtctcccattttctgatgaatctaatattgggaaaagagagcagtgatgcanatgaagattcagaatctaaggctgcaaggaagcaaggtgaagcgacagaagatggcagctgcgcgttcatttctaaacaagaagaaaatctgcagtcacttcctacagaaaataaggtggatgacaatctcacctttgttgaacaagaaaaacatgaagttaaatgcccttgagatacacaggaaatggtcaaagaacaaagtgatatcttaagatggcacagaaagacaataaaactgtga

SEQ ID NO: 459103 - DNA, 228 bp, Sorghum bicolor
tcccggtcgaccacgcgtccgcattgattcgtttatagcgttcgtagtatctactatacatgtgtattgcatacagccgcttccagacgtaacatccctatggccacgggtctaccgttcgtacactggatgatggcggggaatgtcgcatcgcgagagttatcgtctgagattggaggatggaggtgcccttggaacctgatgatcgctataaccccattccatggg

SEQ ID NO: 459104 - DNA, 234 bp, Sorghum bicolor
cgtccgcatttccctccctcccgttccgtccccgcccctgtctgtctcttctgcttcccccccgcgcgccgccgcccgctggtgatccccgtcgccgcggaccagcagcagcagcagcagcagccatgtcgtgctcccacctctccaccgcctggtcctcctcggcgctcgccagcagcgcctccaccacccagcggcgcggaagctccgccccgcgctcgggccccgggggcg

SEQ ID NO: 459105 - DNA, 347 bp, Sorghum bicolor
cgtccggaaaactcggaaggagatccaagctgatgcagcctgtgtggatttgagggttcgttgcccgtacttttatgagctaggattcaagattgttcctttggtgagtgacaagagcattggcctgttcttgcgatatgcattcaccagtaggtacaaagaggttctaagcaagtcccacagttcttccatgatgacagttcccaagtttgttccacggcttacaaaagaagaaactcgagtgtttgaatctgctagagaatcgatggctggtttcaagaaatggagagcaggtggggtgagactgcaaaaggcttccattcttggccggaagaggaagacaaagc

SEQ ID NO: 459106 - DNA, 380 bp, Sorghum bicolor
  unsure (1)..(380): unsure at all n locations
cgtccgaattccggtcgaccacgcgtccgccaacgcgtccgtgcacaacactcccaatttcaaaccagaattggacagtccctgaaatctgctcatgttccggctaataactatacaagtagtttctacaggggagactgggttaaaatctggaagtactaacaatggcatgcttgctactatgagcttgctgacatgttagtgacaggtgctgaacaaatgctttgtccttctttacacaattttcagagtgagaagctattgngtgatcttgggggcctattttccaaaaagtggaagccaaagaagaatggcgcaatcaggggtcctatgctaactagaggtaaattaccttaaactggactgcatgatgactaatg

SEQ ID NO: 459107 - DNA, 426 bp, Sorghum bicolor
cgtccggcatacacaaccaatttaattgatgtgaacattgagcctgttgactcaggccttactgtcaaacgcacaaaagagttccatttctgttcaactgatgtttctgggcccaagaaatctctgcctgccacgttggttgctacctgttgcgatgcagcagctgctgcaaaccctaccggtgatgttcccatgtccagtgcacctgctgctgcttttgtgccctatggcaatgtgcctatgcctgaagttgcaactcatacacgatcacctgctatgcccgtgctgtctacaactatacctatgtcagctgcagtatctgcgcctgcaattgcccctgtgtctgcatctgtggctgtgcctgcgcctacacctgttagtgccgtggtttctgagctgtccgacctagatgttcacaatgaggag

SEQ ID NO: 459108 - DNA, 125 bp, Sorghum bicolor
accgtaccccacatacgctgattgctaccgcaccgagcttgtaaaccgcctgccccaccggtccctttatggattgctctccgaccttggtcaccaatgacattatctttaccacaacgacgccc

SEQ ID NO: 459109 - DNA, 223 bp, Sorghum bicolor
  unsure (1)..(223): unsure at all n locations
cgaccacgcgtccgctgtcactgatcctacgacctcgcgttccttcggcggggctcaggcggtggctgctagctcgctgctggttcagatccttatccacttcggtgcatctaggccattcggagctagcagtttggagcaatcctatttgctttacaatacaacgacangatggggctggcggactacctcgtcgaagtacagtgcgcgtctaattgcacgc

SEQ ID NO: 459110 - DNA, 511 bp, Sorghum bicolor
tccgaattcccggtcgaccacgcgtccgtccgtctggtacgccgccgccttccccttccgcgccgaccccatcgatgtcgacttcgtcagcaccgagggtataagccgcctgtcccaccggtccctcgatggattggtcgcctacctctgccaccagtgccctgatctttcccacgacgacgccctctggcacctcgccctctcccttgccgccctccatggcgcctccgcctccgcacgcggggcagtgccgatcggccgcacgggattggaagccgttccgttccaggtggctgcccaggcggcgcggcacccaacaccttccgccctcacgagcttcgtcacctcggtgctgccacctgtggagcgcgatgtgctctcgctgcttgctgcaggccggcgtaggctctcctcgcatgacatcctgcgcctctccgccatgcttcagcctctcccgctgccagatgcactgccgcagcagccatgttctcgagagctgaccataagaatc

SEQ ID NO: 459111 - DNA, 433 bp, Sorghum bicolor
  unsure (1)..(433): unsure at all n locations
cgtccgcggacgcgtgggtgcgatgcatgccgtcgtgctcgacgtgctgctcatcttccccgacctgctcgcgcagtcgttcgcgccctctggtggggttgggttcgaggtcttccagagcatgtagagcacggtcttcctcttcctgctcgtctccttggtctatggcagcggcgcctgcctgctcgggaagacaccgcggctgcccattgtcgcagatgcaaccgagcgccaggtgatgtgactacaattcctttccctcgaatcatgctgatggaaaggggatctgatgattatgcataaacatcagaatggctcgttggtgcttgcagcaaatcacaagcttagtatagcttacaattgccttgctgtttatataggtctagttaccacttgaatggatgaactgntcaaggttgatacaatgactttg

SEQ ID NO: 459112 - DNA, 508 bp, Sorghum bicolor
  unsure (1)..(508): unsure at all n locations
cgtccggttggtggtcctgaaagacgatcacctggaggactatattatctttcttaccttgatcgtgatatgctcctgggtcgttcagttggtggtgggggagtatttgttttcacaaaagcacaacctcttacgtaaaggttttctgataaccaagagtatatcatctgatggcttggcagctctccttgagctttgcaatctacatttttttgtgacatgcaaatatgtgaccatcacctcattttagtttttaaagagattgccatgatctattttgagttttaagagattatgtgcaacatgttttcttttacacaccagttgtgttgaatatgtagctggctagttgctgtggatatataaagcttcctggatagttctatttcatttgagtgttgtacggatactagaactgtacctacttatttctaattttctggaattagnaatntgacattacgatcagcaaaactaatgtgcagatttactccagttttctattcta

SEQ ID NO: 459113 - DNA, 396 bp, Sorghum bicolor
cgtccgtttcaaccaattgtatactatgctgtatcttttgtctttatagtacaagaatgttttgcctgttaaaggacactaaatttgagtggtacgtcagtttcttcctggaatcaattatttttatgcacaacagttttgttattgacatgacaaattatcttattctcaattttgatgatcctggtccatatggagcaagtagatattcagaccatacgctacctgaagtcctgaaactatgaagagagaagaaaaggtgcacagtgtggaaacttttgaggcttcagacccactatttacttcatacgtgttagaatgaaaattttaagtcacctgtaccaaggcacaagttcttctcttctttgtttcatgctgcatctcttgtacggcatt

SEQ ID NO: 459114 - DNA, 204 bp, Sorghum bicolor
actcgataaaaattcttcgtacaaacactgcatggcatcggcgcaggcttgggaagagtttacaggattggagtactatttccatacagttggagcttgctctgaaaagagagttcggtgaaactagaaatgtcttgcagaatgagaatatgtgcatgagagtataaaagcgactccttatctggactcacgagcatgcatact

SEQ ID NO: 459115 - DNA, 406 bp, Sorghum bicolor
tccgattccggtcgccccgcgtccggttcggggaagaaggtggtataggagctcagattcttcgatgcctagaagagaggacgtggttgctcaacacagcataacacaggtgattgaacaacgaacccagacgatatgaactatacgatgttgatcacactggccttcactatgttctacactggggatatgccattcatgcatactgacacataccttgtgatccttggcacgaaactagacttcggatctcttactgatctagaatacgtgtatcttggcacggttgcatcacttataacatcacgctattgttgaaagaacataatgggatcagcccttacatttcctaagaatctgtgcagactagctgttgcattacaccaagccttatactacagggcgc

SEQ ID NO: 459116 - DNA, 397 bp, Sorghum bicolor
ggcgagctccttgatacagtatgatattcacataaaattctcagtatattctcactattgaccagatgatattttttattttgttctcgaacggacgatatgaccttattaacatctccgatatcttagatgaatgccctagagaacttggggctaaatgtcgttaaagctagtgtctgtctcgactctactggcatgcataacaagttttctataactaaagcgtcagtgaatcttccttgatatttcattagatatgtaaaacttgacatgcggaatctctcattcaagttgagtctacttgtactacagagtacgacatccttcttacttgtactatgctgcatacatcagttcttgcctagaatgagtgccaggaatgctctacaggttcact

SEQ ID NO: 459117 - DNA, 353 bp, Sorghum bicolor
cgtccgcacttgtcaagcctctccctcctgtgatggcatacagcgtatcccgtaatataaactttttcttccggatcttcacacagttctgggatgaagaaggaatcgccaatgcacagaagtcccttggactggggaatgatgatggctcccgccgaatgcgctgattgtggtcaaaccaagtttctgtactgagttcagaactctttgtcctaggcactggagatctgttatatgcttcaaaatactttagtgtgtgacatttcttaagtttgggttgtaattttgtttattatagtgtttgtaacatgcattctctgctagtaaaactggtcgtaccatatatttaaaaa

SEQ ID NO: 459118 - DNA, 164 bp, Sorghum bicolor
cgcgtccccgttgaatctgttagtgctggtgacatttgtgctgtatgtggaatggatgatatcatgattgtggaaactatagctgataaagttacaggaacaccatttgccactatcaaagtggaggagccaacagtcagaatgtctttctgcatcaatacatc

SEQ ID NO: 459119 - DNA, 206 bp, Sorghum bicolor
atcatgtagcaggtgcatatgccaatctaacggtactcggtaccacaccagaaacctgcattcatttcctggttgctgataacctgcttggattcatagctggctccggcaatcccatgtatgcgcatgatgcgtatatgcagaatatgcaccaccattgacacagctgcagagcatgtcaacctctcatgtctggatacaatctc

SEQ ID NO: 459120 - DNA, 121 bp, Sorghum bicolor
cgtccggtttttgggaaatcagtatacagaaattcagagaggaaagtatataaaaagccaaaaaggaaatgtttggacagccttgcaggtcgcaacgctttgttttttttttctctctttt

SEQ ID NO: 459121 - DNA, 499 bp, Sorghum bicolor
cgtccgcttgccctctgacacgcccaagggcctggaggagctgaggaagaaagacctacaggcgccgcctccgctgaattcgcccacaaggacctcttctacgacttcaacgccgttggggcgagggacgtcgttgtcgtgcacgtgcctgagggggtcaaggtggccgacgacccaatccacatcatgttcgcctataccaatagcggtgctgagagtatgctgatgtccaatccaagggttctggtcgtggccgagaaggcagcagaggtggccatagtggaggagcattttggggctggagaagaaggtggttgctattgggccaatccagtggcagagattatcatcgatgagggcgcaagagtggttcattcatacgtgcaacagcaatcatttgctgcagcacataccaaatggacagtcgtcaagcaggatacaactagtaaatatgagtttggtgaggtcagcactggagcaaaaatgaatagacacaatc

SEQ ID NO: 459122 - DNA, 225 bp, Sorghum bicolor
ccgcttcccggtcgacccacgcgtccgtagaacctactatctcccgcgcgcggcgccaccgcaccagcaccctctcctactcctcctccggctctcgccctccgctcgccggggaccccgcgagcgcatcgcgcatggctcgaccgaggtctcttaccggccgctgcctcgtcctcctcgcgggctgtgcccggtgcccgcgccgcgcgcggggggtcaacctcc

SEQ ID NO: 459123 - DNA, 544 bp, Sorghum bicolor
cgtccggcaatacccaagtttgaaattctgcctccgccactgcttagcagataaggtcgaatagttggattttttattgttgctaatcacaatatactccaattttttatcaaatttgtccaagtttatacgaaggttactgtcacagtggcagtagcctggaatttgggggcgtgctagggtccgggtgggcggacggtaagctcggtccgacaattcctgcccattaattctagcactgtttctgtgctcgtcccggtttttcggtgccgctcctgtaggcaggtagctcatggggtctgttgaagtattgccatcagttttttttctcacccacttgatttggacatgagaatctgcatgcatgcagtgatgtcatcaattttttacaaactaaaaaagtcataactactagaccacatctttacattaaattccgattacaccatcatgtttctttcaataaatcctttaaaacaagatcccacatgaatatatttagataaaattttgtaatgaatatttatataagtaagatagaaca

SEQ ID NO: 459124 - DNA, 530 bp, Sorghum bicolor
  unsure (1)..(530): unsure at all n locations
cgtccgggctagctacctcgagctcgtccaaggcggcagcattgcctcctcgtcgggcgccgtttacgccgcgccatgggatgggcgctgcagcgcgcggggaaggatggcagagaccgacagcgacgacgatgacgacgactacgactgcgctcctgctgcctgatcgagaatcaatcgatcgttcgggtgaaactgatctgtgttcagtgttctgagataatgagatgtgctgcgcgtacgaggcgcgcggtaggcgaaccgacgaagagcatgcgtactactattactccagagtagagtacgtgtgctgcttcaagctaataaaattttttgtttaatttctactcctagtaggtacgtaggtatatatgtatntcgggtagcttaattatgagccagtggggttntcggccggggattaagctggagatcatgccggctaagcaataaacactggggtaattagatctatatatatatatggacttcggatccgatgaagaaaataactgaatctagattttttc

SEQ ID NO: 459125 - DNA, 67 bp, Sorghum bicolor
ccggtcgaccacgcgtccggcagcagcagatggcgtcgacaatcatggccgccaccttccgcgttta

SEQ ID NO: 459126 - DNA, 549 bp, Sorghum bicolor
cgtccggaattcctaaaaatcccgagaggagttcgccgagttttattcaggacactgaacactgacaggaagttgatgtggaggaagggaggtgacatgagctatgttggatttacagaggatggcgcacagtggttagttgacaacactgacataaagctaattggtaagaaattatgttcctgactgcatacagatgagggaaacctggtttttcttcctctcttttatccctgacactgctttgttttccttacatgttggttgccatctattcataacatttcgttttcatgaacctgacacacacttgccaggaatccataattggggacaaactttcagtgtgttctgagatatttcttggtgggtcaattgaaacttacaaaatactgctactgtcaattatgcaggagttgacggtctatcagttgcagcatttgattacttgatctctgcccatgtggtcttcttcaaaaccccggatataatccctgttgaggccctgaaactagacgacattgaggccggaatatacatgctggattg

SEQ ID NO: 459127 - DNA, 113 bp, Sorghum bicolor
acgcgtccggccaatcgtggctagttactggacatgagaggtctggatcgcacagaactgaatgacgcagacatgcttgagcgcgcaagcgattcttgcatgcatggtagtgc

SEQ ID NO: 459128 - DNA, 71 bp, Sorghum bicolor
  unsure (1)..(71): unsure at all n locations
ccacgcgccgnaaggcgtaggccttttggcggcagcaacatgagcccgacccgacgtagtgcgcagtacac

SEQ ID NO: 459129 - DNA, 59 bp, Sorghum bicolor
ccggtcgaccacgcgtccgaaaatattaaaaaataaaaaaaactaaaaaaagaacacaa

SEQ ID NO: 459130 - DNA, 422 bp, Sorghum bicolor
  unsure (1)..(422): unsure at all n locations
cgtccgattagctcttggatagttgaatcttaatctattggtgtatgttgaattaacgaattctatgaaggcgctgctagcttgctatgaacgactgctttttaatactaaattttggctgaattccgccatgctttgcatcctcctcaatgaagatgatggtggcaccttgccttgtcgttgccggacacggtccatgtcagcaggtgctgggtgttggcaaagcttgggcactaccaggcatcattagatgctggcccgctccacgtcaacccgcccacgctagctgtgtctaatagtcatggcaagaacccgaatgcctgatagtccacgtcaaccctgcaggagcctaaaattaggactctttttcaaccagtgaagctagatatgtnctggtatctatcttgcaggctattggacac

SEQ ID NO: 459131 - DNA, 123 bp, Sorghum bicolor
cgtccgatcatacagatgcacgcaaacagtatggaccttatccttgtctgaggtcactgaaacagaaagtcacctaactaagcttctatccatcctcgggggatacattatcactagtctatt

SEQ ID NO: 459132 - DNA, 291 bp, Sorghum bicolor
cgtccggtcaagggtggcgcctggaatgtctttctcttcgaggtcttcttcttcctcaggaaacgcacgcgtgaacgaaaacagaaggctgtgtgccggcggtgcatgatgccatacagcgccctgatgcatgcgcttggttagggccaccatgttctctggacaataatgccccacaaggaagggtgtctcgtgttctatgcactatccctctatcaattgtacgtatctgagaataatagccgcacgccaggggaggccgcgcactctgcagatcgaggatgtcctgct

SEQ ID NO: 459133 - DNA, 101 bp, Sorghum bicolor
cgtccgctcctctcgccccccgcggcctcgctcgcacgcacccctcagatccttctcaattcggtcggcacgaatcgccgaggtcaccctactgcttatct

SEQ ID NO: 459134 - DNA, 479 bp, Sorghum bicolor
cgtccgttgccactccctgcttctctctctcttttcctcctcttgctccaccgggtggccacccacagcagtttacaagcagcagcagaggaagaagaggaacaagaaggtttcggctgcctgtatgagcatcatggcgtggtacccgttgccgcagagcggaggcacaccgtcggcgcctggcgacgagttcttcgacgaccagctcagcgccgccggctggccgctctggagcttcggctcatcagctgacgacgatcatcatgacagtcacggtgctggcggcgcggcgcgtgcagagaagcacggcaacgacgacgcggcggggagttctgtcgaacacaccgaggagcctccggtgccgcgccagcagcgcacgcaaccaacagacgacatcttcatgagccagttctcggacgaggagatgtagagggatgacgcgccgttcgaggcgctggacatgttcccgggctccatgc

SEQ ID NO: 459135 - DNA, 532 bp, Sorghum bicolor
  unsure (1)..(532): unsure at all n locations
cgtccgctatgaaagattttggactagaagatggtgaaagtgatgaagagaataatgtcacaaaggtatccaaccatgaaaccaaaatgaaagaagactttgctgtcttatcaggcgatgacaaaatggatgtggtatacagttctgcccctgaactcgttagcttgttgtctgagttgaaggatgcccatgaagaacttagggctataggacagcttaccagtgaggtcacgtcttgtctaggcaaagataaaatgcaaccttttgaagtgaagaaagcttgtttgcttgctcattgtcaagctattaccttctatctccttatgaaatctgaggggttgtccgtacaggatcatcctgtaatttctcgcttgatagagaccaagaatatggtagagaagataaagcaagtcaccatgaattcagcgaggcaaaaagggagcactgatgaccatattatgcatagcggcaccatccaaacagataagaatgtcgcactggacaaacaggaaggcannattagcaatgtact

SEQ ID NO: 459136 - DNA, 482 bp, Sorghum bicolor
cgtccggtagagggcgatagaggcagatggaggcgcaccacgaggagctagttggtggcattgagcgagcggtgcgagggccacgaccacgagtgcttgcgcgagcaagattggagcttctccttcgacgcagttgtggggaacgcagcgagcgcttccctgatgggcgccggcgcccaggatgatgaggaggagacatccatggtggctgagggaggagtcagagaggatgagctagcggcaggagatggcgcaagataggaggaacatttgctacatagtggaaacagagagccagagaaccttgtctctcttctggattcttgccgactgtagtttggccttcgatcgaaagggttgttttgcaatacccttgtcagctcaccaccccttttgtttgcatacacacacacctcgtttctctacttttattgaggaacatgtctgagttccaaactatatgctattttgatgttgcataa

SEQ ID NO: 459137 - DNA, 446 bp, Sorghum bicolor
  unsure (1)..(446): unsure at all n locations
cgtccggtgtcccgggaggatattatggatgcaattgagagggagaaatacggggtcaacgggagacaagaaactgatgattctgaaaggcaaggcctcaccaagttatttccatggttacctaaatctggaaataaaccatcaagccctgatgatttccgaggactgatgggttatcatacattaagctaacttagcagctcttgcaagaactgagaaagaatataaactgaaactaaatctgggaaactgtttcctgtagttttatgtatatcagcaaatatacatcttgtatgtacgaaggatgttgcaaattgcagtcagtggctattggtactttcagaagaaagctgttacaagctacatgaggacagtttgtgaatacagaattccaggatttttcctagggcctgtttggatatcaagggggctaatcagnttcatgc

SEQ ID NO: 459138 - DNA, 482 bp, Sorghum bicolor
cgtccggtccctgcagtgggagaagcctgaagagtatgtgctgtatgagcagcagcagcagcagcagcagcagcagcagcagcagcagaaactgcttttgcttcaacagcaccaacaaaagattgctgtgcagcaactgcagtcaccgccacagggtcaatcacttatatccatgcaaccgattcaacagcttccccaggcacaaggacaaacacaaatgcatatgaaacagcaggaattaaattattcccaatttcaggcagctggttccattgatcccaacaggattcaacagggcattcaagctgggcaagaacgtgcttggaaaagttaaagctgcaggtcgcaataataaagcactagtcaagactcaagaagtgaacaaagcctttgtgctgtccaattgtaggagcagcttgtctagtgcctccacagcctgtccctcatgccgatcagtgtcactccggattagattagactga

SEQ ID NO: 459139 - DNA, 325 bp, Sorghum bicolor
agacggcattcccggtcgcccacgcgtcggtatctggacccggagcacgcgccatggcccaccagttgcgctggcatccacaggcggtgacagagcgggtcagcagaggggacttcgcgactttcgctagccagatcttgtcggagcactgcggagggagctctttcgacgtccttgggccagtcgcgcaagccactgaagaaccggggggcccgtgagcaactgaagcgcataacggttcgcgatggcgacttctcgggctgacgcggagactccgtgacgcgcgcggaacaagggagcgtagacgcgttactttaaatgactc

SEQ ID NO: 459140 - DNA, 443 bp, Sorghum bicolor
  unsure (1)..(443): unsure at all n locations
cgtccggttttttttttttttttttttttttttntggaatatgagaccgattgctttatttccttggaaccagcatgtccgaaaggcaacatataaacaacacaatatttacaaaggaattatatataacgcctcaaaagacctcaatatacatacaacaagtgggaaaatgcggcaaggtagacaagcaaagtgggccacctaagcatttaggatcggacacatatcgttatactgttagccatcacactagcttagtcagttctccaccgggcaagttcaacagctcggctttaacttactcatccaacatagtgtatgacggcaggtccttcacctccagcacatcatctagaaccagttcgcgctccagttgagttcttgttgatttcaagacctcattgaattccatataagaggcacgtttcacaagccactgagca

SEQ ID NO: 459141 - DNA, 126 bp, Sorghum bicolor
cgtccgtctcatcctttcttcatccatcatgcgcgacattccatccccttctcgactacccacgcatcaagcagttcgtggggggacagatactcaacaccatcttcacaaacaacttttatgaaa

SEQ ID NO: 459142 - DNA, 259 bp, Sorghum bicolor
gaaagcgagcagagaggagaagccagagcagggcgaagcacagcagctgacagaagctgagcacgccgcagcgagacagagaacgcagagagggccacagcacgaagaggatcccgtgtgaccctaagaggccagtcagttcaccgggggtggcgtacaggcgtctacgaacggccgaccgacccgcggctatgacgcgcacaggggcgtgtgggagcaggggtgcacggcaggccgggacccgattgaccagacagca

SEQ ID NO: 459143 - DNA, 248 bp, Sorghum bicolor
ccggtcgacccacgcgtccgagcagagatccgggcgcccgtcgccggcgtcgcggcagcagcaccacatgcggcggacgacgagcctgacggagttcgcggcgccggacgtgctggcggacgtggcggaggaggaggaggaggactaggagctgcagctgctgccagcgcacgcggaggcggcggcggaggccgacgaggtggaggcggtggacccctacgggatgctggtgcccgaagctctagggc

SEQ ID NO: 459144 - DNA, 438 bp, Sorghum bicolor
cgtccgcaattctacatccgatgatcgtacttcctgaggtagaagcataccgaagcaagagtcgagcggtgttgaattgaaatggaaggcaggatgacaagtttggaagccgccatgaaagcttcttcgtcaatggcaagcagcatggcaaggaatgctgaccctgaccatcagactctccgctccaattcagtggagcagttttattttccaagacctggccaatctttgccaggcattcctccattctttgggcctccctcctccagtttgtatcctcctaatgacaatgaagctaaatttggcagccagtttgaatcaaatccttcacagaatacagattgggacccgcaggctatagtgagcaacctaaccttccttgagcagaagatcaaacaggtaaaagatattgtgcagtccatgaataatcgagagaac

SEQ ID NO: 459145 - DNA, 436 bp, Sorghum bicolor
cgtccgttgcaactttcttttttgttggaaacaaaattcagttttctattgaccgcttgattttattagctacaacttttatggatgtaaaacattgttcggtgttcctggtattattagtttatatgagtttagaagttcacattgtaatctgaataagatcaagatacttagtttatttttctacgttgcaggtatacaaataccttccaagattatcacccagtgtgggcaacgttctggatgaaataaagcgccattagagaaaaatttttagtttccttaattgggaaatcgcttggaaaatcgtggccttccaggtagtcaatgggtatattggcttggcatactaagttttcaaatctgaaggatgtctttgtctgaaagacctgcctggccatcaatcaaagtgtccggctgggtgttcgggaagact

SEQ ID NO: 459146 - DNA, 117 bp, Sorghum bicolor
cacacaacaccgcgattgggcctctgtgtggcgcacactgtcggcagccgggtgcctactgccacgcgcgcgcccgcgcgcgcgcgagtgagcgcgcgtcgtcacgcggcctcccgc

SEQ ID NO: 459147 - DNA, 126 bp, Sorghum bicolor
  unsure (1)..(126): unsure at all n locations
cgtccgtggaggggttggagcangagcactaagcagcgaacggataatgagcagcagcagcagcctcacctcccgcatctctgcctcaccatcggcagcggccagcactgctcgccaccgccatga

SEQ ID NO: 459148 - DNA, 87 bp, Sorghum bicolor
gtcgacccagcgtccgttcggcgcattcgcgttccgcacccgcgaggagccggagcagcagcccatggcgtggaggaggcgggcgcg

SEQ ID NO: 459149 - DNA, 383 bp, Sorghum bicolor
cgtccgagcacgctgagatgctccctacacgactgcacgtgcggtccagtcgcggccacctctgaccgctgcgactggcgcgaccatcctacgcgggcttgtactttggctaggcgcttagtctgatcgctgcgcctgccaccatgggcgtggtacaacctgcactacccgcagttgtagcagggcttggcgcggcacctgagacgcgacgcgcggcgtctggctgccatggcggacccgtacctgccggtgaccatctccgcctaccagggcaggcggatgaaacgcagcgccgcgtactacgaggtgaacgcctacctcagcgacaccagcgcccgcggagtgcgccagctccgagccgagggctccaaggacgccaacaa

SEQ ID NO: 459150 - DNA, 387 bp, Sorghum bicolor
cgtccgcacaggcgtcatccctctctctccaactccccctcatgacccctctcatcggcttcaagcagcaggggcaatgcagcggcggtggcatccatgtgtgctcccagatcctggcagcatggggttcggcgcgcatgaggctgtagctcccgacggcacgtgtaggccctcgccccagcactagctttggcctaatctctcctctccaccaacaacctctcagatctcggcagagacgagagaggtagtgcaggcaacagctccagcaaagtgtggggaaccagcagcagctgcggcgagctcacaggggcagcaacctgactcctgttgacgaagaacacaccaaggatgagcacgggtattcgttctctcttttcctcttct

SEQ ID NO: 459151 - DNA, 51 bp, Sorghum bicolor
gtcgtccacctcgggcgggagaataaaatacttacagttttctttgttttt

SEQ ID NO: 459152 - DNA, 510 bp, Sorghum bicolor
  unsure (1)..(510): unsure at all n locations
cgtccgctcaaggaagagaagccaattggtggatgaaggtgactctctccagacatccccaaggttctcaaagaccagcagcttaaaatggttgttgcttacactgccccgcagcaattctgatgtctctgggaaggggcaggggaatgaacctggacggtgcccgtccctcatggagctctgtgtcgctagaatctgccaggatatcggcaagtattctacttttgcaatgctgccgagggatctcagccagcagattttcaatgaattggtaaattcaaaccgtcttatggaggcatcgcttcaagttttcagggattgtgctctgcaggacattggcttaggggagtaccctggagtaaaggatgcttggatggaagtagtggcatctcaaaggcagtcattgttgtcggttgatatttcttgctctgaagtaactgatagtgngatagatcttcttagagattgctcaagcatgcaaaagcttgcatgtaattactggatcaaata

SEQ ID NO: 459153 - DNA, 479 bp, Sorghum bicolor
cgtccgcaagtcgctctcgctctcgtcgggaagcaagcccaacgacccctcggcaaagaaactcggctcttatcttgtgcagtcgcagctacaggggaccctgactacgcagtgcttgtagatgacctgagccttgctggtggtggacataggggagaagctcatgaagtttggccatggatttcgtcaccacagcgacccatgtctcgcctggctcataggagcggatggttggtgggatctacggggaggatcttgaacggtgtctcccggactgaagactggaaggcagctgccaactccagtgctctcttcttgacagcggctgcacagaacctgttgtgtctgaagttagcagaggagattggtgttaatatcggaaactattggtttacttggttcaaggttgctagcgtgccagcacttcttgggattttagtgactccttatttgatttacaaaatattcccccctgaaat

SEQ ID NO: 459154 - DNA, 300 bp, Sorghum bicolor
cgtccgccctgctgttggcggccccggtacggcgtggcgcatgcggtgcgccgttggtggccacggctgcccccttccggctttcccctacccacactagcgagggctggtgccggtgttctacaccgctaggcgctcttcttgacctcacgtcgtctgatcgatagggccaacaaggcaacggctgccagtacggacaaaacgaagaggcaaagcgcgcaccacggactgacatgaaatgctcatacgctgttttctgacattctgaatcgacaatgaaggcatggatgcacacttgac

SEQ ID NO: 459155 - DNA, 185 bp, Sorghum bicolor
cgtccgacggagggagggagaagagcatcaccggctgttgcccgcgcctggcgactggcggtgcttcagctcgcgcggctcgcgcagccccgtgcgtggagcatcggatacggcgcggctcggccctgcaggcgaccggccttggtcccgcgcgtgcacgcggcacggatgtggccacgctcaca

SEQ ID NO: 459156 - DNA, 181 bp, Sorghum bicolor
cgtccgcaattactagtcattgctttcttatataagaacataagaactattgttctactgtcaattgtgtcttgcttgatgcaagttgtgttttcgtctcattgttatgtgcggtcagcatatgtgtatggcttgtactatgggttattgccaacttaataaaagtactttgtgtttggct

SEQ ID NO: 459157 - DNA, 398 bp, Sorghum bicolor
cgtccgcacacgtagagcatctcatgctgtgaacctatacagtctggattcccatctcctcatttgtgaatacatgataggctgcagatcgcagcatacatgatgcagaacactttatgccttgttcgttgcggacgaaaatggccaccctcagggcccaacccttgtgaggcgcactaatgagtgaacattcctggactgaatagatagatgtgtattatgaaggcgagccctgacctattgtgccgatatctgttgaccccacacattgaactgacactctacctctactgtttgtaacgaatgatcaagtgttatacgtacccatggtactgtgcatgtgtctaccctactgcaaatacacaacgagcactcagcgctctactgatgtgcctata

SEQ ID NO: 459158 - DNA, 542 bp, Sorghum bicolor
  unsure (1)..(542): unsure at all n locations
cgtccgggatgcaggtttattatatgatttaggcgttataggacaaatactgtacagttgacaaaagtaacttgatctggttttgtgtgcttttcaagcatactcctacataacaataaaagtacttccagcctgttttcttagacctatcaggtgaaacatcttggtcaaaaattatcgccactaatttttctcaacatatctggccatctgggtggtggtccgaagtagtgctggttctttcatttcatttatttctagctcatcttgcctgcccacttatgtagtagaactagaataaactgttgggtttgttatgttactaaaaagagttgtgcctgagagcgttgtggccctccagatttcaaaccactttcaaaaatcatgctgctgcttggactgcagctaanatccaatcctaatgcanttgagtttctccaggtatgttaatgatggaaggcccttttggaatacatagtgagttcatccactggctgttcagatctacagtattttgaggaactgtatcagtactatacaac

SEQ ID NO: 459159 - DNA, 68 bp, Sorghum bicolor
actcacatgactgccttctaaagtcaatcgatgagaccccatggcatgacaccaattcaagaccgatc

SEQ ID NO: 459160 - DNA, 403 bp, Sorghum bicolor
  unsure (1)..(403): unsure at all n locations
cgtccgcccacgcgtccgcccacgcgtccggnggtaacatttgtgcttaggtatttctttgtaatataacatcatatacatactgggaacatatcgcttattttctctatataatttttagataatttctaagttttattttggttcttatttgttaggtgcatcaggcaaggcttaaattatcaaagacaaatgttgttgtcagggttagtaatattgttatgtgttttggaagcagccatttaaaatctcaaattttttggatgcataatccanttaggccctaattttccgccaagatggtagaaaatatacatgagtgttgcatcttgtgaaaataagatttgcatgtgccatgatgtgattgtgatactacatgctttcagctgccgctggtcaccac

SEQ ID NO: 459161 - DNA, 480 bp, Sorghum bicolor
cgtccgccacgcgtccgatcggaatcagctgtggtatcactgaatccactccacatgcatcgctgacaaattaaagtggaagattatcaatagtgtgcaagaccaggtcagtatccagtgttgtagtgctcctttttctgctataacttatgcttgacctgcacgatggctagctgctggtgacggagaaccacgagagcaacacctgctgtgccggatttcactccctcaacgtcgcctcgtcttctaggtgctcctcctccccctcgcttccgagtctcagatgagaaccttaacaatcttaccaagatctataggactggcttcttcgaattttatcacttgagctcaccatcaaaaggtacatgctagatgtaattaaaagggatatgactcagtaaggccagaagtgatgggctgaaccattatttttgaggcgctgtggcgacgtgcggcgccctgcctttacaatgcctagcg

SEQ ID NO: 459162 - DNA, 428 bp, Sorghum bicolor
cgtccgaaaaaaaaaggcagtttcccttctacatcgccgcctccgtgcctctgtccctgtcacgtccgccgcgcaagagccactcgaagccgccgcggtcatccgcccgtgcgaagcctccgtcgccgccccctcctagagttcgtcgtgggaggccacgccaagctcgccgcgttgtgcgttgcgacggcagcggcggtcgccgaacaattttttatggcttgaggctggaccttaagctttttcgctagggtcgactcgaaggtcgaccgtgtataccctagccgaacggaaacagcgatggctgcggctgcactggaagagaggcggtggcgggagccggaggacgaggcggcggcggactgggcgtggagctggggtgcgggcacggacgggcagctggggaacggcggattcgacgaccacca

SEQ ID NO: 459163 - DNA, 77 bp, Sorghum bicolor
cttcttcctcttcatcgaacagcagcagcaccacatgcctgctctcagcgctagactcaccctggctcccgctctgc

SEQ ID NO: 459164 - DNA, 248 bp, Sorghum bicolor
gcgtcgcacgcgtcggtggttgcttctctccctctacaagtcctcgtctcggtagggtcttagggtttgggagggagagtggcgcgcgacgggagtaccgtgcttctcgggctcgctggccaccaacaacagacctcagcagctcgcaactcgcagtatgctcaggcataccgccggagacaggaggcccgcgttcggttcgtaacttgtctctgagcagtcatgctgacgccatcgaaaacatgaac

SEQ ID NO: 459165 - DNA, 166 bp, Sorghum bicolor
aaaaaaaaaacaaaactaacgaccgcgggcaggccacaacatagcttctctttcttgcgacctctatctatctctctgcccgtcgttttccaaccttctctcctgcgaaaaccatctgagtacccaacttattaaccttgctgtccaccccccttttaacagctgg

SEQ ID NO: 459166 - DNA, 336 bp, Sorghum bicolor
cgtccgatatgtttgcaccgtgggtattacatttgcactgaaaatattttaaagtgtatccagatatgagtatgttttcgctctcatatgtttctctggttggcaccttaggtgcctaatattaacacctaaaaatatgactgaaattgtgtttgtatgagaagtactgctgttgtctccagctgcatagaaagaacaatgaaagattcacaaaaacagatcatgaaggcaggcactgtgctgtgataatcaaagtattatattctaaagtggcatcagcaaggctaggatggaagagctggaggccaaccaggcggcccatgacttggcccacaa

SEQ ID NO: 459167 - DNA, 325 bp, Sorghum bicolor
cgtccggccacgcggccggcacgttcgtgtgtctgtgcaagtgccactggagggcccatgagcgtctggcggagcgtctgccagacgaccgacgctactatgacaccttatatgcatatatatatccgtctcgtctctagtctgttaggtactgagtgatgggctgaccgcacgggtcaccccattaatctgtgattaagtatacgaatctgaactccgtgtggaactgcagtaagcatggcgacacacagggcgaccgacatggtttccgcactggctgcctcataaactggatcagttatttgacaggctaagcgaccggcag

SEQ ID NO: 459168 - DNA, 433 bp, Sorghum bicolor
cgtccgggtaaaacaagcgtgtccttccaaacccctttggacaattcatgttattgacaaaccagtatgccgcttactctattatttttctctattttgtctgtctctcatacactaacacatagacctcctaagttttgatgaatgaccatattactttctaggttctgctttgtgttttacacaaaaattctttgtttccttaggttccatgttggccttattttcctcaacctattcttaacagagtaaaaatcttaatagtcgatataggtatatgctgttcgggagcagtagtcccacgatgttactatttaaaatccaatttatatacttgctcaagttacacgttcaaacaaagccgcctacagcagacctaccaagtacgttgtgcctgatttttatgctggtacattccttaaagcaaattttg

SEQ ID NO: 459169 - DNA, 347 bp, Sorghum bicolor
cgtccggacagccccacgggctaccgtggctattcttgtagtagtacttactactgtccaatgggaattgggacgacgacggcacaaaatgtacacgcgcgtgcatcgacgatctctgacggcaggatcgacgggttattatttatataaaaagttactgtagcaaatgggttaattagttctcgacgatggcctcttttttcttggcaaattaaacaatggatgaaatggcactcaaaataaaggatcggatgggccgccccaatggtacgggatcaatcggttacctttgttgggcgccggggcgcccttgctgaaccaagaatgctggtttttcggttcggttg

SEQ ID NO: 459170 - DNA, 327 bp, Sorghum bicolor
cgtccgcgccaggaaaccacttgcagctccgctcgcgtcgcggcgcgaccgcgcgaccgccacatccgcccgtcgcgggaccgacggccgccggatcctggagccttgcggcaacaatctccagcggttggaggggcaccgaagggagggttggcgacggcggtcgagtactgagcgcctgacttcccatcgattgctcatcccggcaatccacggtgtacaagggtaaagtggtgcacctggaccattccggctctagctttgcccttgcattgagatcgaaagctcaagatcctatccatgcaatgcgaagctgagaacaatcat

SEQ ID NO: 459171 - DNA, 335 bp, Sorghum bicolor
cggtcgacccacgcgtccgtgatgcatattataatagcagagaaggcactctccttgggcaagcaagagacatgatgaatcctaaagtcattaagagagtcgaagagatagtgaagataatcaaggacaaatacctttaagttttggtcatcataaaattggggtttaacatttctacttactgtgtaagtcttgtgccatgaccttaggatgatggtcttttacagactgctccctgcaaaactactgccatcattccagttgaactctgatcgcaaaacattccagttgaactcttcaccgctgccgaaacaatcagtggttcatagattaag

SEQ ID NO: 459172 - DNA, 392 bp, Sorghum bicolor
cgtccgcccacgcgtccgcggatagataagcatgacaccgcaggccacgcagtgcgcgtggactcttctgccgagcggcctgcaactgcaatagagatgccgtctgcgtcggcatcggcgccggcgtcaccccagcgctataaatccgtcacctcgccccacccacccgccgtgccgtgcagggcagtgctctcaagtctcatctgcgtacacagtctctgtctgtcagtcagtagttgagtgagtgagtgaggcagcggcgaggaggatggggaagggagcgcaagggagcgacgcggcggtggcggcggcggcggcggctggggctggcgaggtggaggagaacatggcggcgtggctggtggccaagaacaccctcaagatcatgccct

SEQ ID NO: 459173 - DNA, 437 bp, Sorghum bicolor
cgtccgctctcgctctccaatccccccatgagccgtcgccggtgaagaacagcccatggcctgcgtcctggaccgcctcttcatgcccagcaccgacgagccgctccagcgaccctagccgccggcctccgcggcggtggagaccgctaggaaggtgcaacaggcggcgttaccagtatagcggccggccgagcggtggaggcgctcccgctcgtcgtgaatcggcctcggccccagcttcgtcaacagggtgcgtggggagcaaatcaaccgcgattggcccggctggctcttcaacatcgctgtcgaggccatcggcggatggagcccatggcgcgctgactccttcaagaagattggcaaggcttagctttttcttaatgtcatcttgcgaagggtatgcactatgcagagctgtgcaaatcattgggataatg

SEQ ID NO: 459174 - DNA, 299 bp, Sorghum bicolor
cgtccggacgttacgctacagtgtccggcgccacatgcgaaacgacacccaactggcctactggaccataagaggacaaaggtttttgagaagctctcttcgcgcgactactcctagccttcacgacaagacgtcttctatccaagtcaggcgacgctatgtcctggcgtatccgtcgtcaactgctccaatctcttcctccatagttcatcgacgacctcgcgccaccaccaccaacagtgtcactatttttatctccatcactgatgacgtcgtatacttctatagtcgaaagcagc

SEQ ID NO: 459175 - DNA, 367 bp, Sorghum bicolor
cgtccgcccgtgcatgccggcctcaccaccggcgacgggacgcggagacccggaccgcccctccttccgcactggttctcccttcgtcgcccccgccaaaaccctctccaccagccggggggtcaacagctgctcgagatctggccgggttgcttagactcatctcttcgttcctcggtatggacttccacacactatcgcggcctgagcttcaggtgctgtgcaagcgcaacaacgtccgcgccaacatgaccaacgccgccatggctgaggcgctggagagcctagattttgttgatgggataaactacgagatggcgcccattccaattctggtgccagcgtccacagtcacaacacgcttgac

SEQ ID NO: 459176 - DNA, 328 bp, Sorghum bicolor
cgtccggccgcttccacccatggctccaggactgcagctcttcactgacattgccgacgacggcacgccccgtctcaacgccgcctccggcgaggagctggtccgcgtggaccgcgccgtcgctgtcgcccttggcccccgctcaccggagtccccggggactctgttcatcaccaccaggaggatgatttggcttagcgaggcggagaagggcaagggctacgcggtgggcttcctcgacatcacgcttcacgccgtgtcgcgcgacctggaggcgtatccctcgccctgcatctacacacagattgaggcagcagaaggtacagat

SEQ ID NO: 459177 - DNA, 359 bp, Sorghum bicolor
cgtccgacttaaaccaatgtaagtagctcctcttacattgaatcatttgcgcttgtctattagatttgacagttgttgtacaatctgcagtggctataaacgaagttactggtctgtgggacaaagagctcgctgatacaatcaacaggatctgtgaagggaacagaaatgcagatgtgggcacagacactgctgatacccaagtgacaaaaagcaactgtcttaccgatgaacctatccagtctcatgatcgtctagctccgcaagatgggaaccaagtggatgagggatcaatcccacaaagtctgcagaatgatgggagctcagtgttgacctctgacaacatcttattgagtagc

SEQ ID NO: 459178 - DNA, 358 bp, Sorghum bicolor
  unsure (1)..(358): unsure at all n locations
tcgacccacgcgtccggctcagccagacatttggcatatgtatgtccctatggtagtggactagtggtggtgccgtggtgggctgttgcagaaaggacagttttgaaaactttcacatgatttactcttgtaattaactgcatttttctttacacgctacagtctatatgctggaggcgtgtaccatacatgttccgtttccaattaaacaatcttattatatcttgcacaagccaatcccacgtcagcatgtgcattatttccttatgcaaactgcttatctattacaggccatgaggcaaaaagttccttacttccagaaacataatagctngaagcatttgtattggtttttgac

SEQ ID NO: 459179 - DNA, 408 bp, Sorghum bicolor
cgtccgattttcttgtgtgatgtgttcttccactctctgttatctcaacaaagaagccattggcaaaaagttaaataaacaaataagccagaagaccgtatctttaaattaataccctgtctgtgtttcgtatttctacacatgtttttagtttagtccaattcattcttgaaacggaaagagcattcttaagttttctttcttttttttcactcttagagaattatgtacactgctaaacagtatttctccttttactatgcttctgtgttcatattttcataataagttttcccctgttattccatatctattcaatcttctatttcacccaaatttttgtctcgttgcattttagaatatccgttcttatgccttcacttaataaatggtatctcactattggtt

SEQ ID NO: 459180 - DNA, 405 bp, Sorghum bicolor
cgtcaccacgcgtccggctgagatttattgacaaaataaaataatcgcacagtttacctgtctataacgatacgaatcttttgatcctagctaggtcatcggtggacaatagatcgcacagacaatcgacagtgctacacttcagaacgaggatgtctagctggacgtcagtcaacgactaatgtatctacacggactgcttgccactacttgttcgattgtgcataggtgcacagtcattgtcatccatgcatccttacatctagagactgctagacccatattgttgaacagaagctggtaacagtggtttgattaactatctgtgaagtgttcacgtgaggctgaactgtgacatactaattaatgttaatcaacttgggtcgatacctacaatgaaacaca

SEQ ID NO: 459181 - DNA, 367 bp, Sorghum bicolor
cgtccgtgcacgcatccgtacctgctgcttcacccattgctaccaccacggcgatcatccacggccgtctacacgaccgagatctgcaggtacctctctacgctgggcactacagtgaacgagctaggcctggggatgggcatggagctcgcccagaacatcacctaccacacgacgagcaacatgcccagcaacctcctccccgacatggtgaagcacaagctgatgaacctgctgctgatcctcgccatcttgctggccatcgtgctgatgaccgtccgctacggcgccctctacggccccttctgcttccgcggcgcctgcggcggcacctacggcaaggactaactcgacgacaaccttacca

SEQ ID NO: 459182 - DNA, 178 bp, Sorghum bicolor
cgtccggaggactgtatcatctggggagccactacagagagatgcgtgatgtccaatgcactgtacacgagaacaggctgcgggcgttgcggtgcacaccatgaaaacgtacacgcacatgttccttaaagattgctgtacacatgagtttgcgagcaccttgttgaacgccgtcaag

SEQ ID NO: 459183 - DNA, 413 bp, Sorghum bicolor
cgtccggagaaaggagctgagattggcattggaaaagaagggctgggcttcagaaagcaacttttgaattgaaggaagaagaaggatggaagaggtgcaggtgcatgctactcagactcagtgcaggtgcaggcgtgcagctgctcgtctcatcccattcagaatcagaccagagaccatcagagtctttggttgtagcagcacacctggaagtgggtgggatagtatcccctttgggtactgcccacgcaaaggcaaaagtttatctttattgggatggtcctcagccctcgtcctcactcaagtcagcgcttggtcctcgagctacctgctctgatttccgtcggggtcactgttgacctctttttggttatttggtaggcactagtagaatgcctgatttagcagcacaa

SEQ ID NO: 459184 - DNA, 352 bp, Sorghum bicolor
cgtccgggaaaaaaaaaacccacaagaaaaaggaaacaaaagggaaggaaacgcgaggctaaaacaaggttggcggcttcccgaagaaacctcccgttcctccgcgacccagcgaccgacgcctgcgccgccgtccgatccccgaatcgccgccgtccgattccggcaggggagcagacggttcgagcaaattggcccaataattttgggggcagggcagccaggtttgggctccgggatctcgattcttcgtagctagggggggggagggcgccggatccagcggccgtcatggttgtcgatacggtcagcgcgagcactttcataattgccccccacctgttcgaccaca

SEQ ID NO: 459185 - DNA, 100 bp, Sorghum bicolor
cgaccacgcgtcacgcattgtggccctactgctggtggcggccacactgctcgcgcaggccgcggcgtgcccctactgcccgacgccgacgccgtccccg

SEQ ID NO: 459186 - DNA, 197 bp, Sorghum bicolor
cgtccggcggcgcgtacggccaagagattgatacctagacccatggagttccagtgatgagaactgaggatgttcttgccaaggctgcagatgtatcacggcgccatgaatgttgcactgattgacatgctcactatgatggccaagagcttgatgcatgagatattgtagatttcggatgacatgcgataaagaac

SEQ ID NO: 459187 - DNA, 216 bp, Sorghum bicolor
cgtccggatatatggcattgtacagcaatttatagttgttgaattgatccgtaggcagttcaggatgtgaagaattctggtgagctgggcgaatatggatgctctttcaccagaatttagtcaggcaagaaggatggatgctaaaacgcatctggaaatgtaaattgtggcaccttgtttgattttagaactgaaataatgtaaataattgcttgt

SEQ ID NO: 459188 - DNA, 480 bp, Sorghum bicolor
cgtccggacccacgcgtccgcaacacagattatcagaatgaacaaggacatgggccacaagaagaaaatgggcacattcaagacggagatcaaaacaatgaagaaaatggaggttgcaatgatatagagaaccaagccacaacaatatccatgcctcgtccgaacacgaatagtgatgagctaagggactgcccgcagaataacaaggcaatagcattgacttgttttggttctcaagtcacccacaggggaggcgtaacaaatataggtgatcaagtggctcaagtttagtttcataaactatggagccaaggcgggttgatgcttgaagctcaaagatctgcagtagccctattgatcttggtcaaatggctaatccgtgcatagtaaattttcaattaagtttgtaaaatggcacccagtctgtagaacgggtactaaagtttcacatgaaaaactgattattataaaataatcaca

SEQ ID NO: 459189 - DNA, 407 bp, Sorghum bicolor
  unsure (1)..(407): unsure at all n locations
cgtccgttctaatgcgaatctatattgaatcagttagagattacaggttgcttaggcatgttggtaagtgtaacataacttactttcaaatggcccgctgcgggtgtctacatgtacttttgccatggaatatgttgagtttcaaacatggtatttgtgttgaagacaaaaatctagcttctaactcaaatctgctgccttgatccacctttggtggaatttgcaaacctcttactaagaaatcccaatataatctgtacgttagatatggagatgcaaagcaattccacatttgtttgaattaggatgtaataccgtattttaaagctggatataatgcatgtgtgaaaactcanaagtatgttatttgagtattgtaaactggtggatagttgtctaaagaggat

SEQ ID NO: 459190 - DNA, 368 bp, Sorghum bicolor
cgtccgcgaatcttccccggacgattccacccaagaaccgcgcgcaacaacaattcacaccgcgcttctcttctccagcgatgcaggcggcggcggcggcggcggcggccgtggcgtgggcgccgggcccgtcggcgtccacctcctcatcgtcctcgccctccgccttcagggtgggggttccgtcgacggccgtgccggcttcttccgcgcctaggcttgttgccgcctccgcgcccctgggtcgtcgacggcggcggcaagtggttcaagctgttgccaatccagaccctgcaatcgagctgccattgactgctgaaaatgttgagatggtgttggatgaagtaaggccgtatcttatggcagac

SEQ ID NO: 459191 - DNA, 356 bp, Sorghum bicolor
cgtccgggcctgttgagaatctggtgcctgagcgatatgcaactgtggctgacataaccactagagatccaatcattagggatcacacagcactgccaggagaggcatctgctcgagcagaccgcttggatgatctttaccggactcgtggtgctcatgtggaggatctgtaccgtccaggggaaattgctgctcgtgctgatcgtgtggggatcaccactagagctgatcgtgtggaggaactctaccgttctgatcgacttgttaaccgtgctgtggacccccctcattcagcctaccttacagctggttatgagactaaccctgcttatgctgaaacgagcatcaggcctgtc

SEQ ID NO: 459192 - DNA, 427 bp, Sorghum bicolor
cgtccgcccacgcgtccggattaacttgtctggcccaacttatatggatgaacggtcccaagccacaattttgagtccaactgcaggttccatgagtccaaatgctgctccatgggtgaagactatgaggaatggggtacattataacacaagcagaagggataccagtcactacaatggagattctagcattggagcttcattgcacaaccttagtgatgtgtatggaagcaggcgcagcttaagctcgactatggatatcatgagtcagctggagagtaaggttgatggacgacttggtcagaacctcaggtcactgtcatttggaaattcaagtcctccatcaccagcatcatatgcccaaaatggcttggaaactatagtaatgaatcttttggctgccaaacagccataatagatctattca

SEQ ID NO: 459193 - DNA, 480 bp, Sorghum bicolor
cgtccgggtggtcaagggccctggcgagttcgccgggctcgcgccctgcaacgcgcaggtcctctacgcatgaggcaccaccgccggacccccccccccttcgggtagaacgtctgcatcgccggaccgaggaccgacgcttcggcccagtcggcgcacccacacgggtccacctccaccagcccagcgctgcatcacgtcgccggcgaagcgccgagctggcccacatgtcagtggaacgtgacggctccagcgtctcgccggcaggcaggagcgagtggcctgatggattttccgaagaaaaaaaataaaatggaaaacagaagcgcaagcgcaggtgcacaggctcgccacgtgggaccagtgtgtgagcgagcagtgatgatgggacttggccacttgctagaggctgaaaaagcttttccgccacgtgggaccgaggaagcgtgcaagctgtagaaattatttttctttctcttt

SEQ ID NO: 459194 - DNA, 487 bp, Sorghum bicolor
  unsure (1)..(487): unsure at all n locations
cgtccgctttcactgtatctctactttgatcgagttcctttcctacaaagtagccactgaagaaatgcactatgggagagatttttaacgaccaaatagctgaaagatagacaggttaaattccaccaaagttaaatcactttataaagggacgactatgagcagtagattccagatgagtggaaaagccaaatcatggagtccacttcgtcggtgtagctgatcattgaagcaagatgatctactttcctccactaggacatacagagtttgctatatccatactagccttctagaagtatacattttaagttactataccatcatccaaaagatcagttattgtttccatttgtttgttaactatttgaaaaattctatataactcccagtactatatagctaggtaggaagaccctaaccatttatcttcccaaaatttgacaattctatccttcccaatntcccatgtgaaaaccccttttga

SEQ ID NO: 459195 - DNA, 491 bp, Sorghum bicolor
  unsure (1)..(491): unsure at all n locations
cgtccgagaatattatcctacaagaaccgaacgggtggacaagccacttctagaccagattgtaagagcgtcatatgatcctggtgctgcaacagtccttgagagtgtattcaactttaatctttcaattcctcttaactttttatttgattcttttggaggaaagatattggttatccagggtatgaaagatccccttacaaaatctgaggcgtttgttaccatgctccgagagcattgcagcaaggttcaaatcagagagttgaatgcagggcatgctccacatgatgaagttccagatgaagtaaatgccatactatgtaaatgggtggaacagatggaagttaagccagccctagagaagaccaaggcaatatagccatatataggtaaaaatgagaattatggagaccctatccattggttgattgtttaacattattttcaggagcacgagcactttggtaacatgttttcagcgtnctacaaaa

SEQ ID NO: 459196 - DNA, 443 bp, Sorghum bicolor
cgtccggcgctagcagcaatccattgtgtgtaattaattgtaacccgggccggcccgacactgcacgagatggccgactactaccacggcggcagggccagcatgtacgacgactgctacgacgccggcaggcacggcggcggcagcatgaaggcctactcgcgcaccgacgagtactatgacaacgtgcaggacgatcgcctgaacacgcacgcacacccacgttgtcagaagctgatcgatggcggctcaggctctcctctccggccggcagctgctgggccgcccccgcggcagtcggccgtctccaggtcgtcggcgaggaaggcgcccttcgtcgtcagggccagctccagccctccagccaagcaaggtgccgacaggcagctgtggtttcggtccaagcagccctctctacctcatggcacgctgccggggactat

SEQ ID NO: 459197 - DNA, 483 bp, Sorghum bicolor
cgtccgctttttttttttttttttttttttttttttttttttttttttttttttttttttttttttttttgggaagtggggaaaactatagattgattattgggggacaatgtacatgtacatatataggggaggatacggcttatggaaaacacaagcgacctccagtatccttgcctaatacaactcaatctactagagttccggacttggagtccaattacatttccacaaccctagccgacctttatacgagatcaggccagctgggcatgaacccataaggctgaagctaatgaagcctaaggcccataacacagccctgtctaacaattctgagggtaccaagtaaaggcggatgcgggccattattcggcattctctgtccttatcacccccatagtgagggaaccatggaagggggacaccctaaattccatggaggctaccagatttatttatttattttattggttttcccct

SEQ ID NO: 459198 - DNA, 485 bp, Sorghum bicolor
cgtccgggtaaatgtgaattccgttgttcagattatgcgggctacacatgtcagaagggttctgcaatactgcccagtctgtcaatgtgtcatgatgtacttgttagagattcagaggggcagcattgtgcgccaagtgaactcagtatattgcagcagcttgaaactgtagttctggtgccaaattacaatagattgatgccaagtgggcggaccttccttaacttcttcaacaatgccaattgtgcagcagctgcaaagcggctggcctgctggatctcaattcaacgttgtgatgaggatggagacaacaggctccgggtatgctactctgcatgcgaattgtacaacacagcttgtggagcgggtctggattgttcagaccagaccctttttagcaaaagggaagaagaagagaaagggtgtccttgcacaggatatggcgaggaagagtctttctggctataacatctctgaagctcttc

SEQ ID NO: 459199 - DNA, 455 bp, Sorghum bicolor
cgtccgggaaaaccgccggcttatccctccccacagcaccccacagcgctaccgccgcgcacagccatggcatcctcctctacctacctcatgctcgccagcgcccgtgctcccctcgctcctctcctaaggccaacgctgatggccctcgtcgcgagaaccgccgcagcctccatcactagtggcgccagagctagtgtccctctgttcgtcaaccccgccgccttccggccgggagtgcggcgctgtggctgggcccacatctgcagagactcgtccctccagggccctcccggcaccgattctcctgcccagaagcaagaggatatgaagaagagcgaggcggtgtcagaggctgctattcggattgccggaggcagcggcccggaggtcaacgactggagcaacgcggtgctcatcttccggatttggggggggactcctgtactacgtct

SEQ ID NO: 459200 - DNA, 456 bp, Sorghum bicolor
  unsure (1)..(456): unsure at all n locations
cgtccggcgaaagcggcggcgtactacgacgagctcaaccgcaagggcgagggtgcccgccgcttcaagcaggggcttggcttctcctccacctcatccgacgccgccgccttcccttccaagcccaccgcctcctccttcctatccggcttcgttcgcgctggcgcagcccctgccgccgcccaactccctaatctctccaaacagccgccgccgcattccaggcccccatccagtccgcgccgtcgctccagttcaccgcctccgtcgcgtcccaggatccgctccaggtccaggtcccggtccccgtctcgttccagccggcgccgatcgaggtcgggtcccggtcgagggagcgcatgcgccgctccaggtctagggagagggaccgcatggcatcccgtaggcgctctagntcgcgggcttcgagacgcttctcgccggagcggaggagct

SEQ ID NO: 459201 - DNA, 473 bp, Sorghum bicolor
cgactcacgcgtccgcataaacaatattcttaaaaaaaaaaaaaaaaaaaaaaaaaaaaaaaaaaaaaaaaaaaaaaaaagggggggggaaaaaaaaaaaaaaaaaaaaaaaaaaaaaaaaaaaaaaaaaaaaaaaaaaaaaaaaaaaaaaaaaaaaataaacaaaaaaaaaaaaaaaaaagggggggccctttttaggggtccaaggttacctccccgggcattgcaagttttttctttttttttggggcccccaaattcaattcccggggccgggttttaccaccgcggggcggggaaaacccggggggtcccccattttattcgcttggaaaaaatcccccttttgccggggggggttattggaaaagggccccgccccgtccccccttccaaaaggtggccccccctattgggtaatgggcccccccctttttcgggcccttaaagccggggggggggggggttccccc

SEQ ID NO: 459202 - DNA, 408 bp, Sorghum bicolor
cgtccgattgactaaaatttgcccaattttgcctagttgtatatctcattgaatgacaacccaacctactgagctctgttcaagctgtcaaacttgcaacatcttctcctatcgaccaacggtgatgccaccatactaaaaattaatgactttgggtttgccaagtgagagcagtatgccccctcattattgcattagtatttatcgaagcataattttttttgcctcctccaccaaatgtcatagattttatcaggatttgtcactgggacgatgtttcccacctgattttcctccatctatccaactaatgggccttccttgctcctgtgtatgcaggttatgggcagatagaaggggtttgttgctgttggaaatctgtacagatcctatcttctacagtgcatc

SEQ ID NO: 459203 - DNA, 414 bp, Sorghum bicolor
cgtccgctgcgtaggcgcttcataagtatgttgtatctattattattattattatttattacactataaggatttatgtgttgactaaaagaaagaaacagtttatctgttgtatatacctccttccttttggtattgagtcgctgttagcttgataagtatgatcgtgtaaagtacagtgtattgagcaaacttgggtgcttcagctcggttactatttagtactctctccatctgacttttggtatataaattttgttatgtatctaggtatactttccctaaaaaaaaaaacaatatacctaacaactaaaactatattgagggctgggggtggattcactcccctaactaagatattgtcaaaagggaggatgtctctttgccattccgttttccatcgctccttgctgg

SEQ ID NO: 459204 - DNA, 413 bp, Sorghum bicolor
gtccgaaaaaaaaaaaaaaaaaaaaaaaaaaaaaaaaactaaaaaaaaaaaaaaaaaaaaaaaaaaaaaaaaaaaaaaaaaaaaaaaaaaaaaaaaaaaacctaaaaaaaaaaacaaaactaaaaaaaaaaaaaaaaaacgggctatcgttctacaagggggggcccccttttcggggtcccagctttccctcccctttcttgaaacctaaattcttttttttggggccccctaatttaaatcccttggcccctcggttttcccccgtgggtccgggaaaccccctggcttcccccacctttattcttttttccatctattccccttttccaaagttccctttatatcgactttcccccccccttgcccctttccaacgatttgcgcaccctgattggctactggcccccccc

SEQ ID NO: 459205 - DNA, 388 bp, Sorghum bicolor
cgtccgcgagggaggagggagaaaccgaagatggtcctgctgcgcggcgccagggcggcgtgggcggcatccaccgcggtggccgcaggcgccagcggcggcaggtccatatccattcggctgatccccgtcgccgcattgtcctcgggcggaaggaagaggaagggccagcggcggggcgaggccaagcccccgagcccgccgccgccacagcccctgcctcggcagagcgagaccctgagcagcaagaagaagtctggcgcgaagccgtcaggcgaggccaagaagagccgccgcccagtggagctgggagaagcgcgcggcccgcggaggctggagggcagcgaggcgaggaaagggaatgtgcagcagcagcagcagcaagaga

SEQ ID NO: 459206 - DNA, 357 bp, Sorghum bicolor
cgtccgccacattgcagagtatggcgttgggtgcaaaatctcagttgagagtgacatctacagctatggaattattctgctggagattattaagttttgcaccacattgcagagtatggcgttgggtgcaaaatctcagttgaaactgatgacatgtttaaggatggtgtaaacgtccgcaactttgtggagtcatcacttccactgaatatccataacattttagaaccaaatctcactggatatcatgaaggtgaagacggaggacaggaaatggttgagatacagcactgtgcaatgcaactcgcaaatcttggtctgaaatgttctgagatgtcacccaaggatcggcccaaa

SEQ ID NO: 459207 - DNA, 89 bp, Sorghum bicolor
cgtccggccagagtcgagctggactctgacgtgtgccgcccatgtcacaccgagctgctcgtattggcggaaccaccacgcctccggta

SEQ ID NO: 459208 - DNA, 443 bp, Sorghum bicolor
  unsure (1)..(443): unsure at all n locations
cgtccgaagtggcaccaagtagggctctcagaaggttgaacacaagcacatcagatggaatgtcatcatcctcgtatatcactggaagggacgacattctgcgtggcagctgtgagtttggatcttcagactgggagcatgtgctgaaggaagaaatcggctcaacctaagggctcaagggatctggctggaagtatatactagtagtgtacatgtacgggcaaccacgaacctaggaattcgaggcctcttgattttgcttgacaaggctgatgaatgggcactgcttgatatggtgccgctctatgcctactgaaaaaccctnatttatctngtgtggggaacaatgtctataaatcataactnggttgactatgctaattttctagtatgccaaatgcagatgctattttggcacacgattaagaagtccagcgtgccat

SEQ ID NO: 459209 - DNA, 53 bp, Sorghum bicolor
cgtccgggcaattccgtccccactccgctacccaatagggagccacgaaccgc

SEQ ID NO: 459210 - DNA, 310 bp, Sorghum bicolor
acgcgtccgacccttatcgactcaactctgtcctgctggtgatgcatgtaaccaccgcgtatctcttcatagacaacgaccacacctaactctgcctgtgccactctacaactactcatgccacttgaaagttgtcagaactgttgatgccaatgaagcgcgcacatagactgacatgccaagcggatagctgtatcatcttcgaccgcacacctgacatggagaagcggatgctgatgaacactcttgtcatatggccataccattgcgcaccgaatgattggacgatctctactgcaccttgttcatc

SEQ ID NO: 459211 - DNA, 421 bp, Sorghum bicolor
cgtccggcatactgtaaatatgtaacaatcaaggtactttaactatgtaaatgaccagcgtatgtagcatatagattttgcatgtatgaaccaaaacatgctccattgcccttgcgcgcccaagggcgcgcgctttccactattgcttttatacacagacgatgaagcaaactcggcactacaaaccctaggtataacacaggctacccttgtaaataccagtttctacttccagggtctttaaacatatataaaataagccctcctcatacttactttcaaataacattatcatgtcttagcagatgatactacatactgggcacgaagcaactcaatggagtatgagccaggctgcgaatccgaccgcaacatgaattactgattgctcttacccttttccaccatttcagtattctac

SEQ ID NO: 459212 - DNA, 433 bp, Sorghum bicolor
cgtccgcccacgcgtccgataccctgtgttgtgatgtggcctcctcttgatgagaacttccaagagatccatgaggaccaagcgggaggatcaacatcaagagtgaatgatcgcactagcaccgagttaactcagaagctatctgctgcctcagaggagttgcaattcctaagatcaaaactgacactgatggagagatatgccaatatacttcacatctcaatctttcgtaagccacttgatgaacgggcgctaccacgttcacttcaggaatcttctgtctttgatatcagaaaggaatttgagaacattttggatgcagcagacactgatgaacttaatcgtttggagatcttctaccgcagcatgctttctggcgtgaaagataagcttctgaagagaagagtccaagagatggtccaacaatgcataa

SEQ ID NO: 459213 - DNA, 426 bp, Sorghum bicolor
cgtccgcccacgcgtccgaatctgtcgccaagagaaggtgattggatatgccagaaccctaactgtggaaatctcaattttgctcggcgcactcactgtaacaactgcaacaagttccgctattcatcacatgaagcatatgagcctaggcgcagcccccccttcaggggttaccccagctctccacgagggcctccaaggattggtccacctggtgatcgtgcccctgcaagagagatgaccaggtacagatcaccacctcatggttggggagcaagtgatcctagggcatatgcagctcgatcccctccagaacgtgcaggacggtttacagatccatcacctaaggaaagaatgggcttccgtggtgagcgcgacccaagggaccgtgtgaaatttgagtggtctggcactgatgactacatt

SEQ ID NO: 459214 - DNA, 384 bp, Sorghum bicolor
cgtccgcagcacaaagctctcgccttgttacgacctgcagcggtagcggtgctcatgatatcgacgcgagcggtggaggcgccgtcgaccttgacgctggcacggaaaccattgggacttcatgacacattcttagacgggttccaaagcgcctttatgaataacactactgtcgctgctgctcgtatttgacgtgggacctgctgcataagcgatgcctcttgactacctgctgggcaaggaacgatgctgttgaactaccagatcatggcttacccttgaaggtacaaatcaatttaatgaagacttgagtgcatctcaagagtagacgtctactatgcttagactgctagaactttaagagcgaagatgacaattatttga

SEQ ID NO: 459215 - DNA, 335 bp, Sorghum bicolor
cgtccgcccacgcgtccgagaagaccggccagccgcttgaggctggtgccgcccacgctgccgccggcaaccacggtactcacggtacccacaacacccacaacacccacggaaccactggtaccaccggaggcctgaccggcaacgaccacaccaccgactcccacggcgtcaccggctcgcacggaactcacggcactcacggaacccacggaaccggcgcaggtctcggtgagcccgttggtacgaccggcacccaccacaccaccggcacgcacggaaccactggtggcctgaccggcaacaaccaccactcggccaccggaaacgccacg

SEQ ID NO: 459216 - DNA, 400 bp, Sorghum bicolor
cgtccggcggcgcgcgaggccgagatactcatgctcgccgcggacgcgccccacgtcgtgcgcctccacgcggtgatcccgtcgtcggccgccggcgccggggccggggaggcgcccgcggcgctggcgctggagctcatgccggggggctccctctcgggcctgctccgccggctgggccgcccgatgggggagcggcccatcgccgccgtggcgcggcaggcgctcctcggtctcgccgcgctccacgcgctccgcgtcgtgcaccgcgatctgaagccgtcgaacctgctcgtcggcgccggcggtgaggtgaagatcgccgacttcggcgcgggcaaggtgctgcggcggcggctggacccctgcgcgttctacgttggcacggcggggtacatgt

SEQ ID NO: 459217 - DNA, 353 bp, Sorghum bicolor
cgtccggcctggcgccggcgtcgtggcggccgagcgcggcggagctgctcggcgacccgttcctgcagctggaggacgacggactctggtacggagacgacgacgacggcgcgcactacagcgccatgtacaactacctgcaccagccggcgtgcctggaccaccaccacaacaactccggcagcaatggctccacggcgagcaacggggtggtgtcgaacggcgacagatgggacgcggacgacgactctgaggatgacgatggcagcatgttccaaggcatcgaccagctgttcaacgagcacgaggacgacgacgacgagctgcacgtcgctggcgtcgacatcaccatc

SEQ ID NO: 459218 - DNA, 76 bp, Sorghum bicolor
taacgggtcggcccacgcgtccgttcatttaacatgtccttaactccatcgcccttcacctttttgacggtaccac

SEQ ID NO: 459219 - DNA, 344 bp, Sorghum bicolor
cgtccgcaagagttgtgtccggagaaacgtatgctttattacccataccttcctaaggtcattggttctgattttttggagaggaggctcagagatatacacagcaacagaaaagacggagcagcttgccatgtttttgggcacactcatttctgttgggattctgtggttgatgagatcaggtacgtgcaagcccctctggcatacccacgagaaagaaaacgccggatgaacagtgaaggctggttgccattttgtgtataccgtgatggtttcaacccagaaatatacccggcattgtggtcagactactacaacaagaacaaaagggaacccgagaacac

SEQ ID NO: 459220 - DNA, 440 bp, Sorghum bicolor
  unsure (1)..(440): unsure at all n locations
cgtccgacacgacacaagccgagccgaggcgagcaacacaaagcagcgcatcactccccaccgtgtccgtctccgacgcgcttcccgcctgagtccgcgcaaccgccccgcatctccccatgtggccgtcgtgggtcaagacgcgcagctctgaccccgctgccgcctccacctccaccgccctcgtccccgccgccggcgcgtcgccgcgcctctccatccccaacccgtctctcaaggacctccggtccctgctcgcgccggactccgccgccgccgccctgccgtccgccgtctccccgtcgccgcgcgtcttccaccgcatccgcgtcgccgcctccgcgctccgcgtcctccgcacgctccagcactccccgtnctccccgcccgccgccggcaaggagctagcaccgggcggcgggccgggggggctgtacttc

SEQ ID NO: 459221 - DNA, 465 bp, Sorghum bicolor
cgtccgggcatatgattcagaatgacttggtccatggatggggtcttgactttgctctgaggaaatgtgtggaggtattccgtgccattgtcatgcataatacttcacctccccatttctttgataatccaaggattagccacacagttcatgcctttcctctcacaggatagcacatatcagcatcaacagttatatgattaccaacttaattagtgctttttagagttttagggcatagcaccagtctttcaactaatcgccaaaagacggttcaagccattacagcatagaagatggcataccatctgaaaaaaacactgtaaatgtgttttcgactttggatgttatatgtacgttatactgagctgggactcttttactttaatttatagccggctcatgagaagaatggagttgttgatgctcaatggattgttcatcaagcaggtccctcacttggga

SEQ ID NO: 459222 - DNA, 313 bp, Sorghum bicolor
cgtccggccagagaccagtgtggtgcctatttcaaacgtagcctatcttggcctgtatggtgaggataatagggatcgtggttcttctgatgccgcatatggggcttatacttaacatgcgccaccatcctcaagtgaaacggtctgacatgcgtggcctgaatatatacctgttgccaatgacaacagcctgagcctcagctctttccatgagacggctcaagatgacacaacgtccgaagacgtctctgatgcggtgtacaaaatgacttatgatgctcgatatcagttgaactattgccattatgctaga

SEQ ID NO: 459223 - DNA, 378 bp, Sorghum bicolor
cgtccgtcttattttacgaggggcttggcgggaagagttagatggggtttattcaccttccctgttccttttctcctttttctctttggagcttgcaagttcactcttgtacctacacagctactatttcattacctccatggaatcgaagaggttgtatgaggtgaggacgccagattttgggtggtttcagtgtacaggggataatggaatctagctcccaacgatgaaataaggtgtaatttttaagttcgcctgaccagtttcttctcagggctaacatcttttgttaaagagtgggactttactattggacacactgtacatcaattctagttcataactctgcgcatttaccagttctgatccatgtaaaaa

SEQ ID NO: 459224 - DNA, 455 bp, Sorghum bicolor
cgtccgcccctcccctcttcctcgccttatctcctcctccgtcactcgcctcgacaccgccatggccttcgtctccgcgaccgccgccgcctccaccaccctcttcctctccgtcctgtccccagcacgcagcgcgggcgcgtgcgtctgctcacaggcgcggaagccgtcgacagctccgctccacgcggcaaagggccccaactcggcgccggtggtgttggagagcaaggctaagggaaagaagaagaaggggtccggggccgggaacctcgccggagccctcgacgtcgagatcagggaggcgcaggagtacctcgacagcgacgagcaggaacctcttccagacaacttcccatttgaaataattgatgaagatggtatggagcgtggtattttgagaagggactacaaggacgagaagattgaggttactgtcagcatgcctaatttag

SEQ ID NO: 459225 - DNA, 92 bp, Sorghum bicolor
cgtccgctacacgctatttggatgtagcaaagttatcaacatctgtatacgcattttaatctacaaaacttttgaataatttgtacataaaa

SEQ ID NO: 459226 - DNA, 128 bp, Sorghum bicolor
cgtccgcgcaacaagcagccgcggcccgcagcccctcctcgctccaagggccggcgcgctgctcccaccttgaggaacgaaaccaaacccgtcatggccgagcgcctctccgcattcgacgtcaccct

SEQ ID NO: 459227 - DNA, 338 bp, Sorghum bicolor
aaaaaaaaaaaaaaaaaaaaaaaaaaaaaaaaaaaaaaaaaaaaaaaaaaaaaaaaaaaaaaagaaggagagtaaatttaaaaaaaaataaaaacccaaccctctctaactaaaaaatcttatataaaattattatatattaaatacatataatatatttatacataataataaatctggtctgacctatggttttatccttgggggccccgctttttgggttcccccttttttttcctgggtgttccccgctttatcttctctttcgtggcccccttacctttttccctgcgccccctttttcccctccttttctttgattcccccgggtctttccc

SEQ ID NO: 459228 - DNA, 416 bp, Sorghum bicolor
  unsure (1)..(416): unsure at all n locations
cgtccgatggctagtagttgtcttctttgtgggcagcagtaattctagttttaatgtgaagaccatttgacaagaggagatgctaggctatactataatgtactgtagtatccagtctcggtatggaacatgcgggcgctggaaagaggttgtacattcgacaaatcacagaagaaaagacgcaatcatcatcatctttgggatggtgatatgctgtgcatgtgcctgtggattctcggggtccatcttagcggcgcgggttagtcagtctcagtgatactgaaatgttgtacggcaaatgcagagatactgttgtagtatgttttaaaaacagtaagggtgagtggctcatgaaaggagctngcttttattcgttgctcgtgtaacacatgtttacgctgcgttttcaagaattc

SEQ ID NO: 459229 - DNA, 309 bp, Sorghum bicolor
  unsure (1)..(309): unsure at all n locations
cgtccggttcattcaagccagccaatttaactataatatctgcacctaaattggagaccttaggctgtctttatgatacttgttttcaaaccaggcttgtgtttggcaccatatttattcaggtagtcatggcactctattttgttcccatgaaaagtctgctgagttttgttttctgttacagagatttttcatatcatctgcattcgcacatggtttgatgttttgttcaatgcttgattcaaggattagaagttgtaagctngacagcaacagtgaacagtgtcaagactctagctgtcgcatcat

SEQ ID NO: 459230 - DNA, 209 bp, Sorghum bicolor
cgtccgcaagaagtttgttgaagtaaaaagaaaggtttcattgtctcattcgcagaaagcccagtaaaaaagtttgacgaaacgcataccaatggcattctggacatttcgtcactggcacaaggctggatagttgtgagctttgtgttcctctttctgtccaggcaacctaatgaagatggaaaagggtcacccaggactccagaatc

SEQ ID NO: 459231 - DNA, 469 bp, Sorghum bicolor
ttccgatcgaccacgcgtccgccgaccaacaagaattagctcggtagaagaacagtcggcgacgaagcatcggcagatggatcgactgatctggaccggcagaaggtgcagaagacagcagaaggccgcgtgccgaggacttttcgagtgcctgctcaagctgctcaactgaatacacaccagacgatggcctaggcatggactgctactggatctacctactggtctcgtggactaagatatcctacgacagtaatgccctgggatcgaccgctgaggtgctcttctccgaccggccactatgggagactgtcgctcttgataactgcttaatgacgacctacccaaatcatgcaccattcatgtgaccatagctgtgggtactatcgacatcctattgacactgtatggctacattgcatcaggcacaacaaacacatgctgtttgtgccattatgctatcttggtc

SEQ ID NO: 459232 - DNA, 158 bp, Sorghum bicolor
cgtccggcacgccgcccctgccgctggtggcaaggacagcaggctcctcgtcgtcggcagcagcagcggcagcggcagtaacctggttctgccgtcgaagcgggccgccgccgccgcggtcgtcgcgccgctgtccgtcggccgcgtctccacgcgcc

SEQ ID NO: 459233 - DNA, 433 bp, Sorghum bicolor
  unsure (1)..(433): unsure at all n locations
cgtccgaactttccctttttctccacctgtaacaactgagactgaacttgaattaacagaatctactccaccttcaacagaagaaactgaagaaactgagccaacggatgaggagacagaaacagaattgacagttcccactactcccttatcaacagaagaaactgaagtcactgagcctacgactgaggagactgaggtcagcatcccaccaggtgaaccaacaaccgatgagactgaagaaactgaaggaactgaagagactgaagagacagaagagacagaagtgacattccctttctctccacccgcaacaacagagactgaanatgaattgacagaatctactccaccttcaacagaagaaactgaagaaactgagccaacggatgaggagacagaaacagaattgacagtcccactactccttata

SEQ ID NO: 459234 - DNA, 195 bp, Sorghum bicolor
cgtccgccctttcactcccgcacccagataacgatgtgctagttccggcctcttaggacaaagaggggaggagaaaaaaaaatatagagttagtcacacacagcagcacaggaggacggggagagggattgagagagataaagagatttcgggttcgtcaggttcttcgggggttccggttcgtgggtgagcgga

SEQ ID NO: 459235 - DNA, 251 bp, Sorghum bicolor
cgtccgcaacaactattggatattttggagcttacacaccaatcagtatcaagatttcttgaattggattcttactctcttatgcttagcgagatgcaagagaatctttcgttggtttcttattcaagtcgcatctcttctcagatatggagtgagatgcagacagatttcttgccaaatttcatcctatgtaataccacacagcggtttgtccgatccataaaaagaactcaccactcttcgcatagatc

SEQ ID NO: 459236 - DNA, 369 bp, Sorghum bicolor
ttttaaatgcggtaacaattgcatgaatatctttgcaaaaaagacactgacatccactctagttacatttctcattgagccctagttgcagttacaatggctctatgcgctacaaaattctttcaacagctgctcctatgaaccagccacaaagaagcagagggcctatcttaaaaggtacagtcaaacacaaaaggaaacttctatttcctccttgtattattgtatacaccttctatctcctcgtattgtatacaccttctatctccatatattgcggagacggagtgctaggggtgctagctaccggcgggcgggcgggcggccgggatggcgtcgggctccggcggcggcgggagcgacttctcc

SEQ ID NO: 459237 - DNA, 144 bp, Sorghum bicolor
cgtccgcacaattgatgtccgccttccccgtccgcggctccacgtccagcagcagcatcgtcgccagcctcggcagcagccgcgcccccgcccccgcgccgtccttcgttcgccggcgccccagcctcatcaggaacgcccccg

SEQ ID NO: 459238 - DNA, 349 bp, Sorghum bicolor
cgtccgtccacgcgtccgcccacgcgtccgtagaattcaaagcagatagtgtgcaggatgcgactggcaaaaatgctgacctcaccgcacctacaatggccacagtggtatgaaaatcatatgcagaaccttgtgtcttactaaccttatttgtcattttagtaatgcataggagtagaatatatcctgcttgtatcattaattttattgaacttatatagaactcactggaagcatcccaagttagctgttaaaactttgttgccattttattgcttaagttcttccaagctaacccttgtaagcagggatcatattatcaacatattaccagcaaggatcaagttct

SEQ ID NO: 459239 - DNA, 59 bp, Sorghum bicolor
cgcgtccgaaaaaaaaaaaaaaaaaaaaaaaaaaaaaaaaaaaaaagaaaaacgaaaaa

SEQ ID NO: 459240 - DNA, 76 bp, Sorghum bicolor
cgtccggatggagtcaactaagtactctttcttgcagtatgccgatcagatgatgggtccggttttgggaagtttt

SEQ ID NO: 459241 - DNA, 253 bp, Sorghum bicolor
cgtccggactcagaagatgattcaggtgaagaagctcaggctaagccttcagacaaagctatatacaacaaggaggctattcttgaaaaacttgaagacatagcctggcccaagaatgtggactggatgcacaagctcactattgagcatgatcagggggagaaagttgatgtgaatgatgatcttgctcgcgaacttgcgttttacacccaggctttggatggcacaaggcaagcctttgagaagctgcagt

SEQ ID NO: 459242 - DNA, 332 bp, Sorghum bicolor
cgtccgagcgacagcgcgtccgtgtcgagcgtggcttgtagccgcgccgggaggcaggcaatgacctttggtacctctccgccgtctacatattgggctttgtgagccacacgttgtgctttgggatgtctgaaacaatgacaatgcttaacctagaataggaacctgttatttgttagctgcatccacaaattactgattgatttgaactctcatcctgtgctacaactccaacccaatgagatgcagtagcagcaacggactctgcttgctgattttaataagacacatggatgacatatacactgcttttgaactttatgtttctttat

SEQ ID NO: 459243 - DNA, 365 bp, Sorghum bicolor
cgtccggtcaccaccgggcgtcgagatgcaacagcgtatgaagcagcctgcggaccatttcagcttcgcgcctttcaggaaaaccttcgatcaggacgctggtataagtggtgatcatgtgccatctaatcagcttggacgatcagagccgcatcatgccggtcatgggcagctgccacaccgtccaatgctatcgacgacgacaggcgtgcctgctacatctgtactgatcagtatgccatcgaaccccgtatcgactatagtgccacctgtaatgcatgacgcatgggtagttctcgatcatgatcagctgcatgtgccagctatgcttatggatcaccatgacaaatttgagtctgagcacc

SEQ ID NO: 459244 - DNA, 376 bp, Sorghum bicolor
cgtccgataacaaaaccatgtagtttaggctacagtgtctatgcagcacttgatttctttacggactcgcgacacataaagacagacatactaaaagtagatttggcatctaaattagacatgcaggaaactagcagaaaggcatgtgctttctcttttgtaaattattgacaaagatttaggaaattatggccggagagcctgtagcgacaccccccagggctggccctgtatcctatgggtatgatctgagatctgataaatgagatccctgcctctatttctctgctcatagtgacttgtttgtcctattgattgccatttggttatatcagtattcagtctgatctaattacatctatgttaatgtattatg

SEQ ID NO: 459245 - DNA, 76 bp, Sorghum bicolor
cgtccgtcgtttaatcccttctcgtatcgcacctcgcgccgtctcctctctctcaccatcatatccgtcaagatcc

SEQ ID NO: 459246 - DNA, 272 bp, Sorghum bicolor
ttttgcagacctcgactccaaaaacatgtttccacagtatcgatcaattgtcattgattacataccaaaagtaattgaatcgaaagcatacatcacgttttatatatatcacggcttatgaagcagaggagggcgagaggcgacagccgagtgagcggttgttactcgggcagaggcgcgcgcattctacttggccttctctacggcgggcaagaaagcggacaacggcggagtcacgtacgtggaaggcattaacacctacaacgggctca

SEQ ID NO: 459247 - DNA, 221 bp, Sorghum bicolor
cgtccgcaatggccacctcctccgtgctcccgctccacctcccgtcctgcgcgcgccgggccagcaccgtcttgcgcgccttcgcagccccggcggcggcgacggcgacggcgacgaccgcgcagtcgctggaggagtcgttcggccggaagggcctgcggttcgtggccgacccggccggcggagcccccaccgcggagctcatcgtgcggaacggcagc

SEQ ID NO: 459248 - DNA, 393 bp, Sorghum bicolor
cgtccgaaagaataatatagaagataatttaaatgctaataattttgatttagaactagaggttcagccgaatatggtcgaaccatcatccggcattacttcattaggtggagatttgcagccagtggatgatgacaaagagctggttaagaaccagacatctttggaggacttagattccacagctaatgtggactcatacaagaaagatagtcctgaaggtggttctccagagaaattaaatctagacaggagttcaggttatagctgaagaaggtgttgcaaacactgaaccaatcaagcggcaacgtctgtggactgcagacgttgccaaagttccagagagacaaacattgagtcaaactggtcctgaaactcctaaggatatttttc

SEQ ID NO: 459249 - DNA, 124 bp, Sorghum bicolor
cgtccggtggcgcggtcctcggacaggtactctcacgggtcctctctggcgtcctttctgcatctcatgccacagcggatgcctgactgtggaggcgttgctgtaagcacactgttcagcacac

SEQ ID NO: 459250 - DNA, 396 bp, Sorghum bicolor
cgtccgcacaaacatctgccctcttacacacacaccctgtaagcatgggttccctaggcccaagcaccattagcagcatgaacatggccaaggcagccagcgtcgttggtggtaagaccggcgttgttgctgtcgccgaccagcagaaagaagtcccccccaagacgatgaattgcagtagctacgccttccagatgccgctgcactacccgcggtacaagaaggcggactacgagagcatgccggagtggcgcgtcgactgcctgctccgcgagtacggcctccccgccgacggcgacctcgacagcaagagaaagttcgccatgggcgccttcctctggcccgaccagtactgaaggaactcgtgggcgtggccgcgctgaataccgagctgac

SEQ ID NO: 459251 - DNA, 92 bp, Sorghum bicolor
cgcgtccgaaaaaaaaaaacactgaaaaaagaaaaaaaaatagataggattataagaaaaaaaactggctcgcactcaaggggcccggatta

SEQ ID NO: 459252 - DNA, 257 bp, Sorghum bicolor
cgtccgctccctccctcctctccacccatccatcagccgccgcctcccccggccagtgcgttccactccactagcgtatgatgcacggaggcaaacggcagcaccctaccacaggcgagcgcttgcccatcccaccgtcgcccttctatcttcccatcacccagggacagattgagccagggtgttgcgattctcactggcaagtgcaaagatttaagcaggagagcttcaattccgattggatctggcagcagcgc

SEQ ID NO: 459253 - DNA, 307 bp, Sorghum bicolor
cgtccgggtgatcagtcatgacactgtaaccatgtgctaactatgaagtcgatctacaacaaaggcagctgttggcctccccgaccaccacaccatgctcatatttacatctaattaattattgccctctttcaaattgttgcttctttagccggcttccaatgggaggaatcagttaaagagatggaagaagtactgtatcttttggtagcaaggtgaagacagactttattttctttttgtagggcagctgcaatagactatgttttattaagattaatttaaatgggagcttcggctatttatc

SEQ ID NO: 459254 - DNA, 98 bp, Sorghum bicolor
ggctggacgacagaaggaacctacaaatccagatcttctgccgccgtgccgtcggcgtgtttgcggcgccctactcggtctctcaggaatcgatacac

SEQ ID NO: 459255 - DNA, 102 bp, Sorghum bicolor
tctgcgtgccgtgcatgcatgatttgacaaacacctagtgacatctctctttacagatggcgatgaatactggattggatccctaatgatgcatgcaagtca

SEQ ID NO: 459256 - DNA, 360 bp, Sorghum bicolor
cgtccgctctgcccctacataaaccaatgtttgtaaaataatatatagactgactgtggactgtgctatatgtttgcttttgttacaatgatgatattcttgactaacatgtctgcccctgcataacccaagtttgctgatgaggacaatctcttgttcctcgctgagaactgaaatttcttctccctatccctttgatcttgtctggctatttcccgtgagaaaagtattgtcataagctgcatttaaaattgatattcacttagtcatttgtcgagtggagctaagtgaaatctattttttatgagattattcacttagtcatttgtcgagttaagggaagtgaaaatctgtttttta

SEQ ID NO: 459257 - DNA, 274 bp, Sorghum bicolor
cgtccggtgaagcggaagccagtgaatgcagtggatgggaaacatgcagatggggagggtcgcaggaggcaaaaaatagaaaccagaattagttgtgctaaaattgctgctgttactagtacagctattaagcacacagatctacaaaacaagcatgcttcccacttgcctacatcagccacgccaagtactgaagccaatggtgtttttagggagcgtggcactaactctgaggagcatcaacattctgtagagaacacggaaacttcacgac

SEQ ID NO: 459258 - DNA, 292 bp, Sorghum bicolor
cgtccggcgcttgctccttcttgccccatggcgctgctcgccatccagggcatggctatgtccaccgccgccgcggccctcccatcccacaaccacggcgccgtctcctcttctgtatccacttcctcctacgcgctcgcagcctctgccgccttcccccgggtccgagctgcgttcgccgtcggcgcagtcacgtcggccgccgtcactccagttcttgacgtctactgtgggagaggggacaagaagacgaaaaggggcaaaaggttcaaccattcatatggcaatgcga

SEQ ID NO: 459259 - DNA, 93 bp, Sorghum bicolor
cgtccgcaggtctacgggatgacgcgcacttgtaggcattcacagaggggcaccatctggagaaatcagacgaggcctcgaaggaaatatacg

SEQ ID NO: 459260 - DNA, 290 bp, Sorghum bicolor
cgtccgatggcatcctttatcttggctggaagaacagaaagctggtcgtatcttctgcctggtgctgatatttccattttttttgaagaagctttgttaaggtgctttcgcggctttgtgttcagcacatgaatccaaaggtggaacctaaacttaaatatgatgactaaacaatcataaacaagctggttgctttcttactgtttgttgcccagctttgcaactctcccatgctcaccatcatttcggactagctcggtcatctctgatgtacttaccatatgactcag

SEQ ID NO: 459261 - DNA, 61 bp, Sorghum bicolor
  unsure (1)..(61): unsure at all n locations
tcgtttagattttcttgcttctcgatcaacgctctcctgactctnctgacaaaaaaaagag

SEQ ID NO: 459262 - DNA, 420 bp, Sorghum bicolor
  unsure (1)..(420): unsure at all n locations
cgtccgcccacgcgtccgggataaactgcacgtgcaactcaagagaccaagaattgtgcctggggaggaggtcgatgagaaatcaaagaagttcaggcatatgctccggtctgttgttgtcgacggcagtgacatagttgtttctgcaaagaaagcatctgagagatcattggctagattggaagcgagagaagctgcagcaaaggcaaaagccaagagagaggaagaaagggtgcaggaactgaagaagattaggggagagaaatggcttccttctgttgctagacaaatgaaggaggaaaaagcttgngagctgcgaaggcaatgagctgatgatgcaccagatcaatggagctgcgtacgcttatcttcaaagtcagttatcctggtgccctgttctgagcgcccactaaccatgag

SEQ ID NO: 459263 - DNA, 294 bp, Sorghum bicolor
  unsure (1)..(294): unsure at all n locations
cgtccgagcagtttcaggtttaaaagttgtggcggtccactgcatgatgcagtccgcggcgctgctggtgcaaagcagtggtagcagttggtgacgtgcagtccatggtcatggtgctggtgcgcacggngccgccctccacgtgctcccattgtccaaacatcagtcctgtcctcccaatgcagcagccgcccaaccgttatccatcattggtgctaggtccagcnnggctgcagcggtgtacaggatagccaattatgatngggttctctacgactcatgggctaacaccat

SEQ ID NO: 459264 - DNA, 177 bp, Sorghum bicolor
tcgcgccacctcgctgctctccggcccagggttgctttgtagggtccgtgtggatatgttggacaggagggctgatctggaacctcattagccgtgtgtagaatctgagaatgaaataagctgtcacaagcgaataccctgcaaagctgagcaggcatgacacctgatatgcgagac

SEQ ID NO: 459265 - DNA, 514 bp, Sorghum bicolor
  unsure (1)..(514): unsure at all n locations
cggaatcgaccgacgcgtccggcatctggaggcacaaagtgcagttcacctggagtaaccaagaggatagtgccgaggagacggccatttcagatgcctggtacgaggtgctgtccgtgctgcatttgatggccatggtctgcttgctgcaggccaacaccctgcttctccccaggtcatacggcgatggctacgccccaagagtttctgaagagagtagacgggccactgttgatgtcttcttgaaggcagctgggtacctagactgcgcaattcggcatgtacttncgaagatgccgctggaactaaggagacaacttccagtagacctggctgaaggaaatctcaaagctctatgcctgcaagccttgggtcagggggttaacatgcagctcggtttggctattgatagtccaaaggccactttagcagtaaaacggcgcttggcctgtgagatggcaaatattggcacaagttcagagagcatccagagctctgcttgatgatggggaaa

SEQ ID NO: 459266 - DNA, 135 bp, Sorghum bicolor
  unsure (1)..(135): unsure at all n locations
gagaagctctgattaatgatgatgaagcanaagctgctgagatagagtcctttntactttctatcgaggatgagaagaactctcttctgaacaaaatcactgctctaaatgccgaactagcaactcaacgagagc

SEQ ID NO: 459267 - DNA, 331 bp, Sorghum bicolor
  unsure (1)..(331): unsure at all n locations
cgcgtccggtttcgacagcggagagcctaatccaactgtaaatatcctgtgagaggcctgtatttgagggaggaacacactggangacctgcaaatgtggttcaagcttgcattgctgcagacacatgtcctacaacggctattttgactggaaaagggcttctgtccccagtgtatcaagagcagcttggtgaggagcagactgtgacactaggaccagcggtggaataatgcaatgtctgagcgagacacttagagcttgaacttgctgactctgtgagctctttagacctcagaggagctcattacctgtgctgttgtacagaagaga

SEQ ID NO: 459268 - DNA, 141 bp, Sorghum bicolor
gtccggttggttttccttggtggttaagttctttgggccactcattgccggttggcattcgttcgttcctccggccggtcagtaggcgccgacgagggtcaggaaggcggcgtcctgggacgtcgctcgggtgctgccccg

SEQ ID NO: 459269 - DNA, 365 bp, Sorghum bicolor
cgtccgcggacgcgtgggctaatgcacgcgcgcctcctcgcgactcctcctctccctgcacgactcgcgaacaactcctctcctacacgaacgaagctctagcaggacaccaggctaggccgccggccaccaagcaaggacgccaggccaccggcgaccaagcctcgtcaagcagctcatcgccggcttcctaaagacagcgtgtgcagtgctcttcagtcgcacggcggcgacatcggccacggcggcttgttcatgcggcggcccatggcgcagcgtcgtggatccactatggggtgtgagccttcatcacgccggcagccaaggcagaagcagcgaccaggccagacctcggtctcaccacg

SEQ ID NO: 459270 - DNA, 345 bp, Sorghum bicolor
  unsure (1)..(345): unsure at all n locations
cgtccgatttcccttcatccgtggtatgtgattataggttaacctagtcaggggtttactcttccatatcatggcagtgttcatatacttgaaaaccaataggtcaagtatttttgcgtttacctggtattgagctagtgagataagaaataactttttatgctttgtcctatttgcccccatgaatttttaccaactttgcatttataaggtttaaatatttagttgtaaaaggaccttttgctttgcagttagaataatgtatgacaaaaactctggaaggtcaagaggctntggatttgttcatttctcaaatgatcatgaagctaagtgtgccaaggatgc

SEQ ID NO: 459271 - DNA, 199 bp, Sorghum bicolor
cgtccgaagacaggtcgaggttgacataaacgaatggcctgagcaaatagacactgccacctacatgccatcataacgaagagaccatcaatgctgcaatgcattctcactgagcttcaactgaggataattgagctagatacgggagtcggcagcttggagtactgacatcgttactttaagaccgatgcatctggag

SEQ ID NO: 459272 - DNA, 145 bp, Sorghum bicolor
gattccgggtcgcccacgcgtccgtcgaacgccgccccgttcctcaatcacggcggccgaccacccatttgtgcgcgacagcacgaacatgcctagcatggtaggaagactacatacatggtatgcatggcttgcagtacacatg

SEQ ID NO: 459273 - DNA, 406 bp, Sorghum bicolor
  unsure (1)..(406): unsure at all n locations
cgtccggaggaaaaaaacgcttctcttcttcttcgacgttagcccctccgctccgctcgccgccacctcggagcgctgcgccacgccgggccaccccaccctccccttcctttccctctccctctcttacaccgcgcagccgcaccgtgcaggcccgagcgcggttggtttccaccgcggcgacgcactggacgcccaccggcatgggcggcgcgacgcacaggcacggccaccggcgttccctcccccactcccgcctgcacttcgtctctctcctgacgaccgcagccacgtgcgctccgaggaaccctangtgcctgcagatccgactggtggaggatgcctagggacttcagagatccaacaatgagctctagaaaaaataaaatatctaaggatgaataag

SEQ ID NO: 459274 - DNA, 290 bp, Sorghum bicolor
  unsure (1)..(290): unsure at all n locations
acgcgtccggttaatgatcgttcccgtatcctgagctgtgacaagctaagtttctacatggacttgtgagcctcgcacagcttgctatggcctccatgtaaccaccatcgagcaggcatctgttatgttatcagtaacgctactgtaataatcagctctgtggtgtaagtagtgtatgggcgtttgtgttcattgcatcaatgagccagattcttggattcatggntgtgcggntgtatgcgtgtgaaatatcgcatttctgttttcgagcatgagacacgtcgctgcat

SEQ ID NO: 459275 - DNA, 332 bp, Sorghum bicolor
acacctgtacattttaatatacaatgccgtacgtttcccaaatagtggtacaacatcgcatcagcgtcctgtcaatgtaaatttgcgaaagggacgaatgaagtgtgaaaaattacaatatttatataagcaaaatccagagagttgcactcaggcaatcactttggaacgcaatcaatgagttggcgcttctttaacttcccatgggttacaatttcaatttgatctgctctgattgaggacatcatcagaatagctgctggggcaaccggggaggaaattggtggcgaccaggtttatttaaatatatttaaatggtcagagaagatcaa

SEQ ID NO: 459276 - DNA, 141 bp, Sorghum bicolor
cgtccggacaagcgagcgaggaggatgatcgggtggtgcgacgtgtgcaaagtggagggtgagacagggccgtctactatggctgttactggactgcagatccgagcggaggtggagcatcatcacgcaggagcattacga

SEQ ID NO: 459277 - DNA, 388 bp, Sorghum bicolor
gtcgacccacgcgtccggggagctctgcatcctgatccatccattccatccccccatgcttgctttgtttattggctgttcctgagtgagatctgaggctcatggctgtatgtagccatggatttttttccctttctcctagctgcttctgctgctgtttctccaagattcaataggcacggtctgccgtgcttatccgtgctggagctggatgaagcaggctgctttgctgctgccctcatcctcatgccctggatggtgtggtatcggtaccccgtacttgcgtcgctttattcctatctttgctggtgaggtgttatgtcagtacagtagtttatgtcaccctcgtttatcttgttctatatgcttcggtttcctattcttaccc

SEQ ID NO: 459278 - DNA, 323 bp, Sorghum bicolor
cgtccgtgcaacttcagtgaatttaaagttccaacagtgtcccggctatgttctattgaatggtgaaaaggttaaggcaaaatttcgacggtacttgtgccaatggaacaagcaaggtccttcagttgaagctatggatgaagaaaaaaagcattattccgtgtgttattcagtgatcgtcgtactagatccacaagttcaggtccagtgactgttccaagttcaggtccaagttcaggtccaatgggtgttagatcaggttcaatggatctgtcggtgatgtcaaaagatgccgataaagaaaaggatgattagagaggaca

SEQ ID NO: 459279 - DNA, 316 bp, Sorghum bicolor
cgtccgcgcaaaaggaacaccacagcatccccattgcggcatggccatgcccaattgctcgccgccgccgggcggcggctttctcttgttgcggtgggctggtggcggcctgggatggttctggaacgaatcggaagaggagggcctctgggctcatctggccgccgcccaaagcccaacccctctccctctgaggtctagttttccgccctctgatttggttcctgcagtgctagtgattgactcgcttgatcctgtcctaagtcctaaccctgacatgcctgatgaggtttggtgaaacaagcgtcaatcacac

SEQ ID NO: 459280 - DNA, 399 bp, Sorghum bicolor
cgtccgcttctgcggcgggacgtggatctcaagccaggaaagggaaccactcctccagtaacgtgatcaacatagatgatgatgaagacgaggaagatggtaccagaggggataaagcaggtcccagcatgtcccgtgcttctgggtctccagcagctatgacaccgggtcggggttctccacggaacagatatgggattgggatgaatgggatggattccatgtccgacagctctgagagcgatcttactgaaggatgggactcttacactgatgatggcagctctgattgtgagattctcgatgacacttacactgatgatggcagctctgattgtgagattctcgatgacactggtacaacacgtaagatgtgggagacagctgcttccagaaaaa

SEQ ID NO: 459281 - DNA, 97 bp, Sorghum bicolor
gttctgggccacgccgccacataaggggaaggaacaaggccttcttcgcccccgatgcctccgctcctcgcctcccgcgtcggcgctctccaccacc

SEQ ID NO: 459282 - DNA, 224 bp, Sorghum bicolor
cgtccgattctatacacgccagggccgctctctcctattatttcctaacggctaccattttatggtatatattgatacaccctacctcacacgtgttaccaagccatttaggctcaccgagcgaccccattagcgtacaccagtgcgtccctaagaaccgacatgttgtgcgcgctagtgtgagaggtgcacctccggacaaaactgatgacgctatcagacat

SEQ ID NO: 459283 - DNA, 500 bp, Sorghum bicolor
cgtccggtgaatcaataagctgagtgattaagctctagcttaacccttaacatttgcagaactctagaactccaaaggcacaacttgttatgaaattacgaatatcttaggtttgttgctccagattatgccagacttatcatgctatagcatattttattttggtaatgcattgattatttttaaaatagaaaagatactacatctattgtcttaaggtcatgattttatagcagctttcatatgcgaagataatttattttccagatacaaactttgtcttggatgatttattcgttgtcatgttgttgcttacttatataccgcgcctatattttccagttgaacattgaagtgactccgactttaatcctcactggatctgctgcctttgttgctttatggatcctatcttctgttgttgctgcaattggatcagtccccctggacagaagctatgtatgccttcataaatctgaactagtttagtaccaatgtca

SEQ ID NO: 459284 - DNA, 286 bp, Sorghum bicolor
cgtccgctgaaggggaaaagactaaaattaaaggcgatcagcagacttcaacaaggacaatgaggtcatataacaatatattgtcaatggcacagttgttgcatttgaaatcccctttatttattggtgataagaaaatcactctatcatggatggagcagcccaagaaaccagaagctacaacagcatggtggaagaggtcacaacctgctacaaatgggaatggccctgcaaatataatgtgagaggaggaatgcaaaaccagcttgtgaacagagcttttgaa

SEQ ID NO: 459285 - DNA, 317 bp, Sorghum bicolor
cgtccggaaattcatacggtgcaaggcttggtctgtctggttctcagcaaagtagcaaatcacatgaacaagcaggtttacgtgatcgactcctcctattctctgttggggtgagcattggtattctgtcgtcttctctgtcaaacaagaaggaatttgatacgttgaagggcacactgaaacaaatggagaacttagttcaggatttacaagatgaactggagatgaaagagggtttaactgtgaaagaattggctaatgaaacttctagcgaacatgatgatgataatatcaaacctacacgtagttgatccaga

SEQ ID NO: 459286 - DNA, 115 bp, Sorghum bicolor
cgtccggagcgagatatactgatgaaagattataacgacggtcggagagattaatgtgtaacaggatcggtcctactatcatacactggtatacacgcttgtactttagcatgct

SEQ ID NO: 459287 - DNA, 334 bp, Sorghum bicolor
cctccggaaccaacaagaagaggtagagaggaagaagaacacgcctcgttgggctagcttcggcatcatatatatcgatcatatctttgccggcatgcatggctccatatatacctaagctagctagctagctagctaggagccaccatcgatcatcagctagcagcttcttctagctgtcttctcgatcttgtcttctctgagagccggccggcaagcaaggcatggatggaaagggcgccagcatagcaagcaaggggattaccatgccatagctgccttgctagctagagagtgagcaggcgcgcgcgcatgaaagagaccaacacggtca

SEQ ID NO: 459288 - DNA, 351 bp, Sorghum bicolor
cgtccgggaggatgttaaggtcatagagaaaacagcaatgtataggtccacagctagagatgaggatgctcgcattttgaacaaggcaccaaaggatgagaatttggacaccagcagggatggggcttctgatgtcatatttagtcagaatctggttgtcagaagcttccctcagtcagctcctgctgcaccaacagaagttggaggtgttaacttcaaacgtttcaggaagagggaaacagtgtctggaaacagcttcaaggaccttattccatttgcgcgggaaccatacagagaatcggactacgaacgtggcacattgaacgatttcatgcgggaggagaaacagcg

SEQ ID NO: 459289 - DNA, 410 bp, Sorghum bicolor
cgtccggtcgaaaagtatatccattcctaaagtgatcttttctgatctggaaaaagggacagagaaccttgactctgaggtcttatgcacacctggatcttatcaggacacataacaaccacactcggtcatggtggacaccttcagtcagaaaacatcggggagactttctgtctgtcttcactggccccttctgatcatggtctcactagtcagtgaacgtgtgcgaaacccatatacttggatgacaaaaagatgcgcacatatcccgcgtgttcttggaaagcatatggatgatgatccatccattgatgctttgctgccatgtatgctatccactggcatctgaaagcagagatgtgacctctacgaaatggctcatgcacacaccaatctgtctctatatatag

SEQ ID NO: 459290 - DNA, 79 bp, Sorghum bicolor
cgtccggacagactcagccgaccgacagacagacatggccgcctccaccgtctccggactcggcggcgcctgctgcctg

SEQ ID NO: 459291 - DNA, 321 bp, Sorghum bicolor
cgtccgggaagaaaggggtataggtcatttgcagaggagctagctttttttgtgctggtagtgttgtgagacgctcctgctgctgctgctgccgccgccgccgctcgaccgatcgatggcgatcaagagcatgacggtggcaccgacgacgacgcggtcgctggacgcggacatgacggtggacgagttcaaggagtggctgcggcggttcgacacggaccgggacgggcgcatcagccgcgaggagctgcggcgcgccatgcgcgccatgcgcgcccggttcacggggtggaggagcaagcaagggatcagctacgccga

SEQ ID NO: 459292 - DNA, 219 bp, Sorghum bicolor
cgtcctgtctccgtgatgcttcggtcatacgatgaggcactcgctcttcctgtcctgcttgtgatgtgacacccttctgttcctactgctgacgccatcgacagttgaccgatggatggcgatcaacagcatgacgacggcaccgaccacgactccctcgctggactcggacatgacagtggactacttcaacgagtggcctacgcggttcgacacgga

SEQ ID NO: 459293 - DNA, 229 bp, Sorghum bicolor
cgtccggccacgcgttcgccagcttgcattatgatcgaatgcaattacccgtaagactgatgtatatgatgtaagtagcccctgactatcattatataaaggatgtcgctattctactaactagacacactgaagaaagtgctacaaatgggagcaaaggagaaggatgtgcctacgacggagagatctgtgctatacaaatggagggcatagcagtacaaagggctat

SEQ ID NO: 459294 - DNA, 486 bp, Sorghum bicolor
  unsure (1)..(486): unsure at all n locations
cgtccgctttccctagattttcttattccccccttctctctccttctattctctctccttcctccgtccgtcccctcgcctcgcctctcgtctcctctcccacccccaccacggtcaccatctctccccatccccctttgccgcacttggtcttctccctcctcagggcaggggaggggaagcggaagaaggaggcgagagcacggaagcctgatttgatttgcttttggttgccgagaggaggggagttggtgcagtttgtaggcgtgcctctgtgtctctgtgtgtgtggagatggaccccaagttccccacacccccaccgctaaacaaaacggagcccaccaccgngacgaccaccaccacctngaccgcgcagcagcagcagcagcagctggatcctaaggactaccagcagccggcgcagcagcaccacctgcaaatncaaatccaccagccgccgncgcagcagcagcagcagcaggac

SEQ ID NO: 459295 - DNA, 100 bp, Sorghum bicolor
gatatgctagaactgtagaggcagttaaccatgcaagtgctgtccgctggagacactgtactgacgatacgtgactgatagcgtgatgactctgttctga

SEQ ID NO: 459296 - DNA, 456 bp, Sorghum bicolor
cgtccgcccacgcgtccgctccctccccctcgccgcctccctctaatctcgaacctagtagtggacgacaagaatcgtcggcgcggcgcctcggcagattcgtccgctccaagcagggggatggcgtcggcgatggcgacgtcgtcggcgcgggcgcgcaggaactccttcactcacgccaccgccgccatgacgccaactcctttactcatgcccctgactctcctacagctggcttcgctcctgggcacctcctccgtcgccatccccccaggctcctccgctcctgtccccagctcctctgccgctggtgacgctgatgagcacctccactgttgcccccactccggcctaggctcctctacggccagcgtcgctcgccatcggcccaaggttcctccactctctactgcctccattttttttcaattaactgacatgcgaatagatctcacc

SEQ ID NO: 459297 - DNA, 116 bp, Sorghum bicolor
cgtccgcttatgaatgacctcattcagcaatacttgtttcgttctaaggagcgtatgaagcgccatgctgacaagaaacgtactgaacggcagttccagggtggggatatgggttt

SEQ ID NO: 459298 - DNA, 302 bp, Sorghum bicolor
cgtccgctgagggtcaacttgaagctctgactgcacaagctgcagaccaagctgaggctgtccaaaatgaagttgaagctagggatttgcaatccttgggtacttctttgacagagaagaaaatgactgagagtcaacaggaagctctgactgcacaagctgcagaccaagctggggctgtgcaaaatgaagttgaagctacggatttgcaatccttgggtacacctttgacagagaaaaaaggccgcgggcgtcctagaaagaggccgtggaaccgaacttagagcagggtgctgatacag

SEQ ID NO: 459299 - DNA, 125 bp, Sorghum bicolor
cgtccgagatgcctatcgaggagtcgtagatactccgcatttcaccaaccccatggtatagcactgattagatattataagggtttaaagcgaggagaagaaaacacgccggtctaaaaagggac

SEQ ID NO: 459300 - DNA, 115 bp, Sorghum bicolor
cgtccgacgctggcgcgccttcgagagccttatgtgcttgacggactcgcgagcgagctaggcttccatgagccgtcggcgccatgttggtctaccaggatctgctgttggcgac

SEQ ID NO: 459301 - DNA, 315 bp, Sorghum bicolor
  unsure (1)..(315): unsure at all n locations
cgtccgcccacgcgtccgactccccaggtcgagcaaggccagcagatcttccccaaaacaccccaccgccgccgcgaccgcgagcaccttcgaccgagcccgcaccatggaggacgtcatcaccgtggaggcggtggcgggtacggccgccgtgatggaggtggtggtggctacggcggtggcggcggcggctacggcggtggccgtggaggctacngcggtggcggtggcggctatggcggtggcggcggcggctacagtggtggcagccgcggcggcggtggctacggcaactccgatgggaactggaggaac

SEQ ID NO: 459302 - DNA, 402 bp, Sorghum bicolor
cgtccggtccacaagattaacaagcaagccacgcgaaatataaacacacgcgctctagaacctgtagctagctgcaccaacgtagacgctagcgccgtcactcgtagtcgtgccgcttttttgtggtaatctgcagcacttgctgagacaggtagctttgcttgctataggctagtgtcacttgcccaggacaagcaggggagacatggcactgacagtgttcgagaccaccgagcagcagctcctcccgtgccagcaggccgtcgagcagggcgctggagatggtggcaacggcaaggccgtagctgctggcgccgagaaggctgctgccgtcatgctcaaggagacggaccacggcggcgacggcgaccggccggagagggacgacatatggaacatgat

SEQ ID NO: 459303 - DNA, 487 bp, Sorghum bicolor
  unsure (1)..(487): unsure at all n locations
cgtccgaaccaatataattttttgtcagcaatctttggcaagacagccatgcaacaccagttgccatagcaaatgtactgttaatatctgtgatttatttatcagtgttgtcaaccatattatcctcgcgaaagctgtctgcctttaactaagtcttaggacatatatgatgttgcatttactttggccatgaaacatgtagacattttagctttaatgaattaaattaccaggctaagaaaatgatgctgatctttgcctctagcacttcagtttttccttcagcagtgaatgagttatcatacttgcatacgtttttttttgaaatatcagtatcgattgaaattttggcatccctttnttctgtttttttagccatgcaactcttgggctattcaaaaaactccaacagagagctccgaaatcactaagaaggtattatttcaaaacaataagcttcatccaaatgttcgacttcatattccat

SEQ ID NO: 459304 - DNA, 472 bp, Sorghum bicolor
cgtccgctcgaatcagtaatccttttcgtggcttgatgggctgcattgccatatttaatttgtagatagaatcccaagatcgaggagccaaacatttcaggttatgcaattgaacacccggtaatatgagttaactgaacatgattcagccggtaataggagtattaatcaaatagaaacagagtaaattgtgaaaaatttcacactaggtctaactgtatcgtgagccttttttaggataaacaatggaatttctttgtacagcgaaaggtaattgaatagcaaaattacctgttcaacacatttggagaaactaaacttttttgcttcttcatctgaagactacagtctgcagagttgcgatcccatgaggggcgcaacgaggtttctgtgcgagtgcaaccaaaaccaaggaataaacatgcaatggctagaagatggaactcttctcaaatttgatgagcctgatgct

SEQ ID NO: 459305 - DNA, 438 bp, Sorghum bicolor
  unsure (1)..(438): unsure at all n locations
cgtccgtgagaatcaagatatcccaatgagtgagaccaacagtgtctgtgaagcacaagaggatacagagcaccagccttcagagaaggatgcacctgttgcatgggaggaggatgagaacaatgtaggttggatgcctgctgttagccgcagcacacacagaagatatttgcggaggaaggcaaggcgtgatgcactcaaggaatctggagaaagttttgagacaagttctgttgctccatcagtcgatgatgataaagatctctctgaaaatagtggattggagcatggtctgacttcaacagattctatccctgagaaaatcagtgcaagttctgatggtcttgaacatcaagtagaggatgatactgaaattgctggaggacattngcattctgaccagcaagcttacggtgatgatactgatgtgtgcaccaa

SEQ ID NO: 459306 - DNA, 436 bp, Sorghum bicolor
cgtccgcccgatccctctcctcgctcgctcccaagtcccacaactcccacccactacccacccagccgatcttttcttcctagctatctcctctcgcctacgtactgaagaagccacatctgtatcggagagcagcagggagggactcactgcatggccatggcgccgcccaccaacgactcggaggcgccatgcacgcagcggctgcccgcggaggacgagctgcagcagacgccggctgccagctgcggcggcgatcgggcgccggcggcagggacgtcgtggaccgagcccgaccaccaacaggccgaggcggagggcgcggagaagaagagcagcagcgcgttggcggcgggaagcggcggcggggagccgatggcggcgcggcggacggaggagatcagcgcgcgggagcgcctgaagcggcaccgcaccg

SEQ ID NO: 459307 - DNA, 384 bp, Sorghum bicolor
agaggatcatcctacacagatccaaatgttattttcacacatgaacatcgcacactgacattgcagcggagctgggttcttctaaatagtgagaatctggcatttcaggctgcctggggaatcctcatgtacggctgaagaaactgcagccagacaggagaaggcagcgccaccggcttcttgatctcgtcggcgttgttgtacaggtcgccgtggcgcagcacttccagcatctggttttggttttgccatggacaggacagaccagcaactcgtgtcagcaacggattatggtagcagagttggagttagaaacatcttactttggtgatgacggagaggtccggcgggcaggccccgccatggagcgttgccgccagcgcc

SEQ ID NO: 459308 - DNA, 101 bp, Sorghum bicolor
cgtccgatttactattatgtattaatgaatcttggcagggaaaatgccactataaaaaaaaacaaaaaaaaaaacaaaaaaaaataacgcagagcatgcag

SEQ ID NO: 459309 - DNA, 452 bp, Sorghum bicolor
cgtccggacgctggataagttctccaactctttggtatacgatgactgcagcacccatccctcattcagtgagagctattacagcagtgtagatcccagcatatccttcgacacacaagatcttggagctgcactgaaaggcttcattgctaccatctcaaagcctaaggcggcatatagaggatggagaacattgtcttatgttctaggatggattttctataccaagagaatcgttgcaaagagaaagaaacatgggaaataagtgtacacatgtatgtgtagttaaattgcaaaataagtggagagatcatgtacattagtttgtttcttgtcacagctggtaagctctgctggtttcttcagctgtacatgagagcattttatcagctagggttccctatgcggctgtaaataatcagatgaagttttgtacagggtgagggatgcgc

SEQ ID NO: 459310 - DNA, 492 bp, Sorghum bicolor
cgtccggccatatgtggaggtggcactctaccatgaaccttcacggcactattggtgatcgatgttgtcacctatgttcctcaacaagcaccggagtatatcacaacaaagaatcgttgttggcatctatgaagaatggctaggtagtggagatgagcaaagggaagttggttctcgataaacccgttgttgacaaaaggctaaatcatcaaaaagggacaatggctacttatatgttgctcttgcgtggatttcagtgtgtacacccattgttcttgccctgcatattttgctgcttcaatatgcccagcgggtcgcgaagtgatggagcaaagggaaagctactgtcacccactctgacgtatcaacaacttgggcatcgtcaaggaaaacactagaggccttatctagaatgatactgtcacccacaacatattctaggttgggaattctttgtgtctataaacccacattttgattttttagtagaga

SEQ ID NO: 459311 - DNA, 475 bp, Sorghum bicolor
cgtccgcttaattgatgtcagtaagtaaaatttaaaggtgtggcacaaaattgcaagaaaaaaaaatactataattggattcccatttagctaaaccgtgttctaaaaccacttcaaggtgtaagttgacctggttttgatagtttgatgagttaaaatgtttgatgttgcggtggatgttttacaagttcagatatgtaaaatggacttgttccttaaggaaaatgattggatatttggttttgggacacctcatcattctttggctttttttttggctgagtccatttctcaacaccttttcaatagccttatattcctacaaggaataggagcgagagatcagctcattcctttcctgaagtgaaattagaagtaaaaaaaagatctagtcatagtgtcatactaggacaaacccaatcctcaaacaatgtgccccataacataagtgagaattgtatgttaagaatgtctg

SEQ ID NO: 459312 - DNA, 425 bp, Sorghum bicolor
cgtccgctggatgtgactgctcccatggtgcccctgctcaggctgtgctcgcacacaagcttcaatagaatctttgcgccaccaacattaacgattgcagtgctaagttttagctgcccaaatcgatgacaccaatattttattcaatcaaatgtggtttaccatatgcctgcctttcaggttcgagtagctgaaatctgtctgagattaaatgtgtacgcacatgtgcatgacacaaagctgatataatagcatgcccttattcgaatgcttgcttcatatgccgttactatgatgtatactcacttggtactgctaccagagctatgtcaatccattgatctatgctattgatccatgattatgatataggtatctgcgttgccatgcatgtgtatgttccaccatccatgacagatggatgt

SEQ ID NO: 459313 - DNA, 265 bp, Sorghum bicolor
  unsure (1)..(265): unsure at all n locations
cgtccggaccagcgcacccgcaccggcccgccgacgaagaccatggcgaccaaggaccccgcggccaccggcggcgagcccgccatcggcatcccctaccacccggcgccgggggcccaggggcactactactacgcgccgncgccgaacccctacgcggcggggatgccgccgcccaacgcgatctacgccggcgcgcccaagggggtgccgctccagcagaccatgttccgcgacacgcccgcgccctttcactgccaggcct

SEQ ID NO: 459314 - DNA, 306 bp, Sorghum bicolor
cgtccgcagaaagtttggtggttgtggagtctgtccacctcaaattatgcatcctgttgatggtggatatctgagtgcacagccttttaatccctcggcccctccaggaaattgtgtgatgggattgtgagttgtgaatcgttgtgatagtattgaaagtgctacaatccataaaccatgtgtaccgagtttttcactctagcattagggatcttacgtgtttgtctagaaattaacgttactttgcgttaatgtattttcttgtactcgagcacttattacatctatagcaatctttcataaaaa

SEQ ID NO: 459315 - DNA, 471 bp, Sorghum bicolor
  unsure (1)..(471): unsure at all n locations
acgcgtccgagcggcggtaacctcaacctcccgttgtacgctcacccctcgccgtcccgcgacggctcgagcggtccggctggtggagcccggcgaggaatgagcttctgcgcccgcgcggtggacgtcggggacgaggcagcctccagctccgccgccgtgggctcggacctctccgcaccttacctctccgtccgcattcgatgccgcaggcacgacgtggaagcactgtccgaggcgctcttgtgcttcggtgctagctccgtgaccgtggatgacattgccgatgctgaaaatctcgatgaaatctccataacttccttatatgccgatggggaagacgtggactcaagcgtatcaagtgccgcatgctcagctggtttgaactacagcccagtgtatgaaacctntgtcgggaagcagtgcgattgggtggcaaatgtgcaggaaacatacgagcccactgaagtg

SEQ ID NO: 459316 - DNA, 537 bp, Sorghum bicolor
cgtccgcccacgcgtccggttccatctttatcagatctccaccttacccacctgcagtcgagcctgctgtacccggggctccgccgtcccgaccatgtcggtccgacgatccctatcccggcaagaatcagcaccgacctgaccatcggaggcgcaccggcgcgcgacgacgacgtcccgtgcgctctgtccatcggcgccaccaacaagcagaagcccgacgccgtcaagccggcggggctagtgctcttcggacggaccatactaaccgagcagcagatgagcctcagcagctccggcggcgcgacctccccagccgcgactaccggcaacagctctcagctgtactggaacgccgagaaggggcccaatgtctcggagggctcgggctccggcgtcatccagaacagcccgaccaagaaccacgcgtcgtcggagcggctgccgtggtgcgtcggggacggcggcagccagcagcaggtctccgagctcgggcttgagcccgggcaatgcaaggtgttcgcgagccgacacggc

SEQ ID NO: 459317 - DNA, 569 bp, Sorghum bicolor
  unsure (1)..(569): unsure at all n locations
cgtccgctctcctgtccaccaccgttttccttttttgcccccctccccaatcccaatccccagcgcgggccggagcctcgcgaacgcgagcgagaaggggatctgggtcccatggattcgtcggcgacgggatttaggggacgcatagagtgggcggcgccggcgttgaaggatttgctgccggatctgtcccgcgacgagcagctacggctggagaacggcggccaggcagacgggcgcaggcacaagcacaagggacgacaacgcatcatcaagcaggacgaacaactgatgtccatggcgttgcgcacagaaggagagcgtgacgccttgctcatcaggagagtccaacatgctctctgtcactacaatgccaggcacaagggtggtgagtttgatgctgtgaagcccctgatggaagcccgagttggtttcagggaccaggtgtggntccacctcaacttctgggctcgaagccgcagcaccaacaaaatcaagcgcttcttcgccgggtgcactacaagccatcctctgacacctncaaatacccacgtgcaacgactcccatc

SEQ ID NO: 459318 - DNA, 561 bp, Sorghum bicolor
  unsure (1)..(561): unsure at all n locations
cgtccgaccggctgcgcagtgccgccaccgcgctaccgcgacgacgagcgggcggggcggcggcgcccttccctcgcattgcgcactacggactgctcccccctcggcaccggcgccggcgccggggatcggtgagggccgtgccgcctgagcagagcagcttgccagcggcggcggctgtgtacgggagtgctggcgacgtcaaggcggcgctgtacggagcgctggaaggcgccaaccgagggatattcgggatgacgtccgccaagcgctcggagatccatgccctggtggagctgctcgagtccagcaaccccacgccggagcccaccgccaagctccaggacaaggtggatggatgctggaagctcatctacagcacgatctcaatactggggaagaagagaaccaagctaggactgcgagatttcatcagcctaggggacttcctccagataatngacgtcaaagaggaaaaaggggtgaatgtgatagagtcagcgcgagagcaatgaagatactgtcgnggaagctaccatcgaagcttcgtacagtgtacta

SEQ ID NO: 459319 - DNA, 534 bp, Sorghum bicolor
  unsure (1)..(534): unsure at all n locations
cgtccggagcaagttgagctcacctcatatttacagcaaagatcctggggatgaggaaagactatctactccaggacagaacgataaggagagtagttgctatcataattgtgaaaggcactgttatcagcctatattaccatggataaatggcgatggtagcacaaatagcactctctatgaaggttgagtcgccgagttattggttatgtcatgcactatcctggactaatggaggaagatgttatccgtcggatggatgtattgaatcctcagacttgcaggaccctgctagaaaagctaacgcttgatgggtaccttcatgttcgggtgtttgaagaacctgtgccgatggctccgaccatactgcagggtttgttgaagcaacactctagtaaagaaccatcaaaatgtgtgaagcgctacttcgcaaacccaatgagcacattacaactgtaactgtaagaatagtttaactntgttctagatccagagtcgtgagtgcatcatgatttggaatgttaaatgataccc

SEQ ID NO: 459320 - DNA, 492 bp, Sorghum bicolor
cgtccgtccatcttcatggacgacttcagcagcaccaagcgcaacatcatcggccacgtctccgggtggctgctcagcgactcccgcgacgacaagatcgacgacttcgtgcaggagatggagatgaccaagttctggccgctggagcgccgtgaggccatcgccgaggtcctgctcaagaacgtcgacctcaagaccaagttccactgccccgagaagtacgagaacgaggagcggttggctgatcacaaggagcagtgcagcttcaggcccgtggtgtgtcccaacgacggctgccgcgcgaaggtctctgtgaggtgcatgaaggaccatgacgccgcgtgcttgtacaaggtgcttcagtgcgagcagggatgcgagaagaagctgctcaggagggatatggatcgccactgcgtcactgtctgccccatgaggcccatgaagtgcccctttggatgtgattcctcgttcgctgaccgtgatcttgag

SEQ ID NO: 459321 - DNA, 413 bp, Sorghum bicolor
cgtccgcgtgctccgccattggtgctactaggaaggaagaagcaagatgctcacaggcctgcaacgcgtactgaagccacgctcgttgggcgatggcaatggacgctcatcctgctgctacttcattgtcgattgtaaacggatagctaggatggtggcactgatcactgacggctcgagcatcatcagtatggtcacagccggctagtacggcacgaacggagcgaggctcatcatcgaaaatcgacactactaccgtgcgccatcagattactatgaccttggccaccattccttgcgctccgatcacatgtacgtctaatgcgaggatgaagaccacgatgtatttgttcttatagctgccacgttatttttaccccggcgcgtgagggcgcgcgctttctactagtagt

SEQ ID NO: 459322 - DNA, 494 bp, Sorghum bicolor
cgtccggcaaagtgttaagcttggcccctgcctactaggggatgccccaaaaataaatgtcatccctgctgggaatgaagtgaacaaggaagaaggctgctctgaaggttttccacctataagaatctatgatgaagatgtgaacatgaaatttcttgtctgtggagcaccatgcaccctggatgcatgtttgttgggcgcactagaagatggtttgactgcgctgttgaatattgagattcgtgcgagtaaacttcagagccgatccagtgctactccacctcttcaagctgaaaatcttccacatggagttgttacaatgcgctgcgatatctcaacttgcagttctgcacacgtgtcatttcttgtttctgccagtgcccaaacttgttttgatgataagcctctagagagccgtatcaagaatgaaattattgagaagaggcaggtagttcgtgctctatcgaatactgaggataacaagccatcatatg

SEQ ID NO: 459323 - DNA, 507 bp, Sorghum bicolor
cgtccgacctactgcagcagagccaccggccaagaaggctaggaagaccaagaaggttgcaagtgttagcttcctggggttgctttgccttgcgatgctctgtgggtgtttgatttctgtagtacatcggatgtatccctctgttgatgctggagaaggtgctgcatttggtccttctcatcatgggaggatcctggctgttgaggggcctcatgataatgtctcggatggtatcgatccaaagccgccacagagtggcagtgagacccttccagcgctgttgtatctaccgaagaatgggaaacatgtcaagattaatgggaatcttgttattaagtcaattgttgctagtgagaaagcttcaatgcggttgcctggctatgatgggacgagtcctcaaaagcaaaagaaggaagagactagcttggcaattcccggctatgtgactccattggaagctgggagaggtatggaatcagccaaaggagtgatgaaaaatgaactgat

SEQ ID NO: 459324 - DNA, 571 bp, Sorghum bicolor
tcgaccacgcgtccgcccacgcgtccgcaaacctgtcaaagggattgctgtacctctgagatcatcacctcgtttagctgcactgaagattagccaggaagcagggaacacacccagagatggacatagtggcacacagacagacatcactaatgatccacaaccaaagcaaatccaaaaacctaggcgaaagacaaattcttctgtacttcctgagaggaaagatggagaatctaccaggagttcagcagaaaaccttccttcagttcccaatcaaacacagggagcatccttcccacactcttcaggagatgctggatgccagaatgcaccagctgaggctcctgttctgcgacaacaagcaggacaaggtgaaacatctgatggtttatctggatctgccctgtcgtcactatttcaacatgtctggtcagacccatgccttgtgtttgcattcaggactcttctgggtgatattcctgttcttgatgacgctcgagcatatcgatcttcagcttatgatggtaatagagactactaccttccaccacagagcatgaataaaaacact

SEQ ID NO: 459325 - DNA, 530 bp, Sorghum bicolor
acgcgtccgccctctcagcatcttatttgttcctcattctcaacttaatctgcatccttccattattacttgtattgcagatttgggttcagccagagtgtccgaaacttttgtcgccggttctccagaatctgcaatttttgaatctggaagaactccctgaaggatgtgatatagcttggacaagattcttccttgaggctgcacctaacctaaaggaggtatgcatcacagtttgggaccattggtgtgatatggagacagacaaggtggagcgggaagaacagggttactgtgacaaaagaaacgtggagtgggagtcatctgcccctgatggtttcaggcattacaacctgactaagctcaccatttatggttttcaaccaaatgagaactttatgggatacacaaggcacgtcatggaagccgcagttaacctagaggagatatccttatacgacaggaaggtcctccagtgctgtgaagacttggatccaaagatcgagggtgctccatcaagatatccccag

SEQ ID NO: 459326 - DNA, 410 bp, Sorghum bicolor
cgtccgagaacacctcgcatacaatctcctccaggagagtcgagccgtattggccaaaaatagttgcgtgctactttggagaaccaacggcaagaagccgccaactcgacgccaaaatcattgtgatcttcctcatcgtgccgctgccatcgacgtcaagtgcacactcatcggccaggttttgtgggacatgtggcttctgtccaaggtacatggagacatgatgaagagggtctgcattcaatttcagctatttggttcaactgtttggacgccctgactcgcgttagcgagatggggtggcatcgtccttcgtggctctgcatccaaggatcctagctgctatggtcgagacatcggggaggacatgagacatgatgttgttggatctaacagttacccggtcctcc

SEQ ID NO: 459327 - DNA, 556 bp, Sorghum bicolor
cgtgcgaacggcggcggcggcggcggcggcggctgtagcccggctgccggagtgcggctccaccggtggactgctcatcagtggcaggaggggggcactagtgccccgccgccggctctcgcagaagatggcgttcgcgggttgtgccgcgagcttttgcacggcagcctcgttgaagcgaccaccgagaattcaaggccatgctaaccaggtttgtgcagcacggaggagacgagcggacatccagtcggacacgtacgtgctgatggagcccggcatggacgaggagttcgtgtccagggaggagctggaagagaggctcaagcgctggctggagaactggcccggtgacgccctgcctccggacctcgccaggttcgacacggtcgacgccgccgtctcgtacctcgttaggtccgtgtgcgtgctcgagatcgacggagaggttggatccgtggagtggtaccaggttgaactggaataagttggcgtaccttgatatggcttatcacccgaaatttcacagaacaacaaatcaaccttggaatggaggctt

SEQ ID NO: 459328 - DNA, 475 bp, Sorghum bicolor
  unsure (1)..(475): unsure at all n locations
ctcagcctcgtgcatccagtgttgtaggaaattttggtcttttggcaaaggcaagccagccagagccagccatgaaaccccctcagctgcaggccggggagggctcctgggctcacgaggtcaagcaggccctccgtgagaaactccggcgctcctacagcgccgccagcacaccggcggccaggccggccggcgaaccgagccgtggtggcgctgactgccgcggctcggccgccgaggaccccataaggagagtcatgttcttggctccctggggtcacacataaaacacanaccgagatctgggtttgcaacagcatggccgcttgtgtggccgtgtcttggtcagatctgcaaggaactgaaccataaaagaaccggagcttgtcttgtaaattaacatgaacatgaactaggtacatatggantatatgggatggtgtgtgaaaaaacagggacgtagccatgtctgatg

SEQ ID NO: 459329 - DNA, 542 bp, Sorghum bicolor
cgtccgtgaaaattgattatctgaagaacacatgttcctcatttgtcacataagtagacttatgtccaaatttattctaatcataacgaatcatttttaaaacccatattggttcttgtcttcggcccacaaatacttgttaccaagtttacgcctagcgcctagctgaattttgattttcacatttgaaaatttacctaatcagtgtggtgtgtcattatgcgcaatagctgataggaattgcctcttgtgctacctacatcaagtttctggtgaacaagcataaattatttttcttaactacagttccctacaactaaactcaatcttcttagtttaaggaatatatcagttttttatcttagaagagctaaaatgtttgttcctaagacctaatcagctacaaaatgcactattgaaatgtcatatcatgacaattttatatgacaatttgctttcacgtaaactctcagcttacaaataataattgtctggatgtaatctcagaagctatattggaatatatattattcttcatctca

SEQ ID NO: 459330 - DNA, 464 bp, Sorghum bicolor
cgtccggtgaagctagcattcaacaaaggaagaagcgagcgagctgacaaaatcgactgaccatccatccatggctctggcgccggcgcctctccagtgcttcctcacgggcagcagcagaccggtgtgcacggcgactccgcccaagcacgcgaggaggccgtcgaggatctcgagcagggcgtccggcgacgacacggacaaggtcctgtgatgcggtaatgatctcgtggtgaagctgaatgagctggacatggccgcgcttgccgtccacatgcttgctctggtcaaattgatcggagccttgtggatgaatgcctatcgagtagtataattcctctccttccggtccgcgccacgatcgtccggccctcggataaacaactccaggacgaacatctacatcaacccgcctgaagctgtccggcattgctttcatcttttgtcaatatgcccggtcttcg

SEQ ID NO: 459331 - DNA, 481 bp, Sorghum bicolor
cgtccgattttctatttggtgttgtcatgtttcttagtgtttgctaattggaaggctaaataatcaagcccacctatcaaatgcctgaattatgaaaatttgttaaagattaggatatttgagccatgtagtttgtaaacatactgggtatgtaaataaattgacataaggatcagtcatacaatgtaggtagcacaagagctgaaatcatcagaactatattatggcaccaaatattgcagtgcttatgttgtctttttcctaactgtcaaatcctggttaccataaaatgattgttgctcacttttattccacatctgaggcggtgaggcctgatgaccgtccgacgtccacgtgagggggagtgctgaaatataaagtgaatttgcccaccctttccatcatgttagcttttaggttgaattggtttgtggtttggtgcatgcaactcaagactatgcattacttcagaaaccaatga

SEQ ID NO: 459332 - DNA, 494 bp, Sorghum bicolor
cgtccggtttgtttcatttacagacctgatgataccccgtgggatggaggttagttcatctgatttctgttgcagatgtttgcttcctagacccaactcatcgtgtgcttatccaaacaataataaatttcatctgcatatgctgctgctggctttgccaggtgccagcaacacaccactgacgtgatacaagcggtacagaatacgacaatcgcttagtaggtagtagtctacttgcaggtggcaagcagaagttttcagttatctgagtttgttggccttactgtccaatgcatagctgctctagagtacaaattccaagtcaagatttatagaggaaactgacccccaaattcaatggaactttgtaacgtaccatgctaacgctaatgtcagtcttgggtaagagatgatatctaattaacttctaaaacaaatagtaatagttataaacaataaaactattgtaaacctagtgagaattctttttcttc

SEQ ID NO: 459333 - DNA, 494 bp, Sorghum bicolor
  unsure (1)..(494): unsure at all n locations
cgtccgatattgttgggtggagaacatcatcaatcagaaaagattctgaactacccaaggtaaaccttctgtattttgcgttgtgacttgtgttggtttcactgaccgataacatgatcttttctttcattctaccattcctaatctgcattttaagtattcttccagtgggctgattcaaccaacaagatttacccgcatattgtatatgaggaactatccaaatcagaagttcctaatcaatgtgctgacactgacaactgcacactagaagaacgccttttacaaggacttaagcgtgtgtcatgggaaaaggtggacgttagcttccacaacagtaaagtaagatctgcggcacatagtgtgattcaggtattgcctttgcctcctggtggcattctcatattcagaagtaaaaatttgcttcggtaccaagtgcataagtcgttctttccctgtcaacaatntagtggccagcacttaaatgtttgtga

SEQ ID NO: 459334 - DNA, 348 bp, Sorghum bicolor
cgtccgatcaccatattcacgcacgccgttcacactccgtctttctgacgagccacagctcaagcgatgagcgcggttcgccgtggcactatcccgctgctactgccccggcggctggcaataaccggatcaccggcagcatcacgtacgtggcgggcatgaacgcctacagcggcctgaaggggctcaacaaggtgaacatgctcggcgtgcgcaagaccgtcggctactgcttccgcaagatcgtggtacggctcatccctgggtgcaagaaccggcacggcagcgcattcgatgcccagatgaacgtatacgggggagatcttcacgatcggcgacacgatgaac

SEQ ID NO: 459335 - DNA, 437 bp, Sorghum bicolor
tttttgtcattctcgagaaaataagatgcatacatactaataacatacagaatataatctttgtgccattacgaatgtcaccaatccatgttttttcaatctgtactaacctgatttattctaggaaagaagtactatttaactatgcatgtacgtgcccctgcgtggaaatgtacatccagtgatgcaacatgagctagctaattggactatataccaatgaccagcagagaggcgagtgttttattgctcaattcttcagaaattgtcgcagttggctggctggaaggacagcatcgacttctccacatcgtaccggatgtgatagttcatttgcatgatgttcccaacaatggacaggctcggcgacttctgcacgatccagcagctgacgctgtcgtccacggccccgaagtagttctccgtcggcagatcca

SEQ ID NO: 459336 - DNA, 142 bp, Sorghum bicolor
cgtccgctccgtcgctttgcaagcgaggacagatggacggatacatgagggagacaagcgccgccagggatgagggcggccccgccgtgtgcaaggctgtgtcgggcggtaacgtggaccggaagggcggtgcgtccacttg

SEQ ID NO: 459337 - DNA, 495 bp, Sorghum bicolor
cgtccgcattgatctagaggttgcagaatggagagaacattgatcacctctaacctctccatgagtgcacatgcttcaagatcgtccgggagggttcactacatctctcctgccgcctctgctgctgcacagaactccagctacaggaagaagaagaagagcgccccgtctccgccgccgtcggccgccgcaactgccaccgttgtcacctcccctccggccactgacaatgttcagtccagtgcagtgaagcagaccgggcgacaggagctggaagagctcgtggccaccaaggctaacacttcaagaattgcaagtgcgccgagccaagctcaggctcgggctcagcctcgccgccggcctgccccggcagccacgtccctgccgatggcgttctgcagcgcgttggaggaggcgatcaacacgttcgtcgacccgccggcgctgcggccgtccgtggacccgcggaacgtgctgtcgaccaacttcgcgcca

SEQ ID NO: 459338 - DNA, 367 bp, Sorghum bicolor
cttcctacttattgccactcccctttttcttccttttacaatagggttgctgatgtcataatattatgattgtttttaaaatttctgttcattgcagaacaatcctggctggggttttgacaagaaatgccaattcatggacaagtttactcgcatagtttcagagcaatacaagtagaaaggcctcttatactctgttgcagtaaccaccttatttatcctcaaaggagatttgaagggtgctctttgttttgagagaagatgtgatgcccatatctaatccatgcaatgattttttttcttgttcactgggatgctagtttgataaataaaattgctgataaacatggtttttttgcgtgaaaaa

SEQ ID NO: 459339 - DNA, 487 bp, Sorghum bicolor
cgtccgaagcaagtgccataagcacgtggttatcacaaaggtccttgtattgtctctgttcaaacattctacaactttagtcacacatactggtcatacattgatactttaatcttttaaccaagcatagcccttgtaccctggattccgttcaatagatcaggagctatatttggcaatggagtggcattataaatttgcattccttttctatgggcgcctgggcatgagaatattggtacgttgtcatcatagagcatagaggcttaagagtttaagactactccctaggttcaggcttcagcatcctaatgaacatagaaaatcagagttctgctttgtactatcgtcacttcttgatcaagcaaactgtatagcatgcatctctaaaaatagaattagcaccgtgcgagctgtaaagtaatgtttgtttctattttcaaaatcagtaccattgcattattcctcggtagaaactggtgctagc

SEQ ID NO: 459340 - DNA, 407 bp, Sorghum bicolor
cgtccgcgcctcgtgtcctcttccacctcccgccccaatccccccgctcctcctcctccctatccaccatcaccatggccacagccaccaccgcctatcatcattgcaacgccatcctccacctccccagacctccgcacttccgccagcctctccccgctctcgtcactcgcagagccgcgggcgtcgggctgggtgccgcccgtctcggcccgaggacgagggcaagctcagtacctccaccgccaccgttttttgaaaccgtggaagaggaggaggaggaggaggagcgtgggttgtcggatgcggaggcgggcttcagtgacgaggcggaggatgagcaagagtgggcgggcggcaacggcgcggcgcgcggggaggacctgggcgcggacgccggcgaggac

SEQ ID NO: 459341 - DNA, 487 bp, Sorghum bicolor
cgtccgcccacgcgtccgaagggcccctgcgtcgtcctcggctacaccggcggtggcttccggttcgggggttcagtccggaggggtaccgcagcacggacgactactacgacacgctggacgcgttcctcttctactggcccgacgagcttgctgcgccggcggaagccgccacggagacttcaccgctgccgccgcccgtggtgctgccgaaggtgggcgggagcggcgcggcgctgttcgactactcccgcggcgggccacatgtcggtgccgacggcctgctcatcggcccgccgctcaccgccgtgatgggcgtgttcactggacccgactccagcgccggcgtcggcgacctccgcagcgcgcgctcgcggctcgggctgtcgtacgccaggcggccggacgggaaggagagcctgttcggcgacgagggcagggcccaagtcgcggaggtgctcgtcttctgtaacccgcggatcgcgag

SEQ ID NO: 459342 - DNA, 384 bp, Sorghum bicolor
cgtccgactatttctctagtcttcaaaggatgactttcgtggactccgtgaacaagttcaacccacactgtagttacatggagcaaatagttggatgagcttactgatgtcatggaaaagttgaacctcaagtcacgaggtagcacaatgggacttgatgtgtcattattcggttcctaacaagggactgttttgtgaggcacctcccctcctgtcaggccagggaactcggattcctattcctccatgcaagagcttttacgtccgtttgccacatgagaatggcaggcagctatcggggctggagtttagtcttggatcatcatcatgattcgggacacatctgtggcagacttgttgggtacctttgctggcgaccaacat

SEQ ID NO: 459343 - DNA, 228 bp, Sorghum bicolor
cgtccgctgagggtggtgaggcttcggcgtcacaaaaatcagcttgctgcggatcgtgagggggttaaattgtcacagggaaaaggaagataaatagtgtgataccatgcttgtaatttacccttctaccttttatttggctgtcatcgttctcttctaacttttaattgcaattgcttggattcagatttctctgtgttgtaatgtgaacaattttagttgtaaaaa

SEQ ID NO: 459344 - DNA, 489 bp, Sorghum bicolor
cgtccgcattattaccagaaagtacttcaaaaaaaaatctgagatccttttatgggatcaaattgcttatctcagctttagaataaactagtgacctgtcaaactgaaggtagtccagcaaatgtttaatcatttattttttgttcgccttcagcaacagataatttattgctatgttgggggttaatgagctccttaggtgtgatatgaatgtgtcatcttcacaatcgcttcagctttgtggcacattagagtcaaaactagcttttgtttatgcagtgacttggtttactaaaaaaatatgtgtaggtattaagcacttgtcgtatgatcatatagtggatgttttcagttttgggatagttctttggagctgctgaccggaagcttccatgccaagacattacacgtgttcagggcttcagacaatagttgccattgttcaaaagggttatggttgcaaaaaatatggatccaataggactcgct

SEQ ID NO: 459345 - DNA, 417 bp, Sorghum bicolor
cgtccgcctcgctccaaccgccgctgcgctgcccgtgcccgagaccaccggggaccgcgtcgaccggcgcagcagctacaggaaccgggactgtgacgtgtgggagagaaggttccccccccagccatggcgagcgcggatctgctgcggaggaggggagttctctcctcctgtttgattccgcaaaggcgaggcgccaagtcggctacagtgtagagagagatgaagtctgggacatggcaccaggcagaaccggagatacgaagggtgatgaccgtgtgattgaactgtcccgcttatgttgaagaaataaaggccttttgcacctcaccggggtgagaagacccttgtagattctgaggacagtgttggtgaatgggatgcctaagagcatgcatggagctgagcagattgatg

SEQ ID NO: 459346 - DNA, 492 bp, Sorghum bicolor
cgtccggagaacactaaaaggtagtatgataacataacaaaattttgattgggatgcacaaatgaattggaacaaattccctgcccaaatgcatggttttcctttttccttcacacgatcagtatcgctatctttttgacaacatgataaccacaactccacaagaccttgccaaacgcaattttctttcttttctttctttcttgctatcgctatctgtctatcaacaagctcacgacgggtcgtgaagataaccctggccaacacgcagctcaattctcatttcatgtggttctacgatattgatcccaacttctcattatttctgttgagtagtgttagattaattactaaatgctgacatagtgtatccgatttccgaacgtaaatccgaagcaatgttatgcatcgcacctagctcttgtccaatagaagttttttacaacatgtaaggttaattacatttaccgggccgacacgtatatatatata

SEQ ID NO: 459347 - DNA, 487 bp, Sorghum bicolor
cgtccgcccacgcgtccgaattaatctacatactttctgtttatatttatttattattaataacatatattagtaacattacagcaagtagtttccttttccttgaccccacatcttatcatcattttgcaggatgaacttgtcaaataacagttaccgagtgattaaatgccccacagtgagccaaatggctggtgttggtgttctttccttggggaaatcggagagaggggtgtactctggagtaccttggaacgatggatggccccgatttcaggtgtggtttcttaacgaatcaagcgagcagatggagtggatactgaagagcaacatcagcctccaagcagtgctacaaaatttccccttattaagtaatcacaacattatttacggcagctgggccgttacctctaataaatctataaatgagcatgtggagcgagcaggggctcaagaggaatttgaatgggactcggacgatgtgttc

SEQ ID NO: 459348 - DNA, 436 bp, Sorghum bicolor
cgtccgatttacttataatttgctagataaatcttttaagactaattaatttacagttagacaataattatcaaatacaaataaaaatggtatattaaaaagtttttcactcaggaaactaaacaaggcctgacatgatttttatatgttgtgttgtgtctggatctgtgcagccgttcggtcaagttccagctttccaagatggcgatctccacctatggggtacgtacgcaacgcatatgatcctatatctcttggtgtctctctgtaaatatgacagtatagtagtattcacccctgccatcatatatatatatatatatatgcatcacaaaaatggtatgttttttttgccagaatcgcgtgcgatttgcaagtacgttgcccgcaagaacaaggcagcagagctgctgagggaaggcaacctccaggagtc

SEQ ID NO: 459349 - DNA, 376 bp, Sorghum bicolor
  unsure (1)..(376): unsure at all n locations
cgtccggggagcgtgttgtgttttatcatctcctgtccgcgcaaggtttggcttgagcctcctttgttgttggtgtcgctgtggactggaagagaggggctttgtaactggtggagcagagattgtttccgttttgatcatggcgtgaactgtatatattttagcttgctccagctcatgtaacactttcttgctgcgtttgtgcttgggacacgaagacctgtgttgatggcttcattagtgtgacaatgatttggtattggatttttggttgatcgtctgccattcctgtgctgaactgaagtgctgtttatttattattatggttttgatttgcgctgngaaaaaaaaaaaaaaaaaaaaactaattaaaaac

SEQ ID NO: 459350 - DNA, 351 bp, Sorghum bicolor
ctactttgccgattcgtgtatcacacgatcacacttctagaacgttgggaaggaagtattcacctcctattataatatggactgcaatgattacaattgaatcaacttgaatcttgagagcgacataaagctctgacggccactacttttgcctatgcatctgtctttaaatgctctgacatgctgtcaaagtaagagctaaactggtggttccttatgagacccatccaaccttttcaacgacatgacggggatttgttgggagccgtaggaacacaatgaccgttcaagccagtaaccatggtgggaaggtcacggcgcccagcttacgatgactgtagccactctggc

SEQ ID NO: 459351 - DNA, 473 bp, Sorghum bicolor
cgtccgggttagcatgcttgcgtacttctgtttcttggaacaacttctggttactaatttgcagtcacgtgcactggcaatttcattgcctttctcatgcgtgctaggcctcctttcttcaatgatagcatcaactatggtgtcgaagagctatctatgggcctatgcttcattccagtttgctattgtcatcctgtttgctcatatcttctacaatgtgttgagagtgaatccagtccttgcagtcttactctcctcattcactgggttcggtattgctattagtacaaactctctgctagtagagtatttgaggtggagagctagaaggaatcaccgtttggctcagcaggctgccaatgccgcacagcatcaagaatctgggaatgatggtgcaaatgacaacgatggtgctaggcagcaagggcgcgatgcaaattctgggaacaatgctgtatgattcagattatgaa

SEQ ID NO: 459352 - DNA, 475 bp, Sorghum bicolor
cgtccgcgcctcttcttcttcttcttcttgccttggtccaagaaagagagagaagagctaacagcagtcaggcagagcagcatgtgtccaggatccgtggaggcggcgggtgcggcggtgaagagcgtgtgcgtgatggacgcggcggggccgctgggccacgcgctcgtcgaccgtctcctccgccgcgggtacaccgtccacgccgccacgtacgccgtctgcggtgacggcggggacgacgaggaggaggaggaggccaccaccgcggcgctgctcagccacctgtcgtcgtcgtgcggcgtggacgcgtacaggcaacggctggagctgttccgcgccgacccgttcgactaccacgccatcgccgacgccgtgcggggctgcgccggcgtcttatgcatgttcaacacgcccgacgaccatgcccagtgcgactagtcgacggtggatacggaaggtcgggcggcgcaca

SEQ ID NO: 459353 - DNA, 407 bp, Sorghum bicolor
cgtccggcggatgctacctcgtctacgacgccgtcgcctccgccgatcgcctctccacggtgcccccggcccgcgacgcgggctgccacatcaacgggatcgggtcggtagccgttgtcctgcgctggcaccaacctggcccttcctcctccgacggctacctcctcgccgagctcgccacctcggcgcagcgcaaattccccgaccccgatgatggtgtcctcttcctgtggcgctccgacgaacaacccacaccccggtgggccaggaaggaggttgatctcccccgtgaggtgtgctgggcgcccgacaagcacgtattctacagcgacacactcttcttcgggcccggcggctgcctgtgctgggtggatctgctccgaggcatcgtcgtctgcaccaaccct

SEQ ID NO: 459354 - DNA, 429 bp, Sorghum bicolor
  unsure (1)..(429): unsure at all n locations
cgtccgagacagagacggagatggttacctccaaggagttggtggagaagcttcaagccttggtcgcccagatggaacagaagcagaatatcatggttgctgaagtgtctaggctccaaagtgagatggaccaattggtgaagacgaatgaagcggctgttgtggcacatgactctgagaagaaaatgatccaggctgaattggagatgctgaaagggagcatggacaagattaagtccgagaaagatgatgctttaggcatggtgcatgctaaagatgctgaggtctcagcggctgttactaggagccatgaattggagttggaagtgaagaagatggagacggagatggttgcctccaaggagttggtgnagaagcttcaaagcctggtcgccgagatggaacagaagcagaatttcatggttgctg

SEQ ID NO: 459355 - DNA, 383 bp, Sorghum bicolor
cgtccgcactcacatgcacacggacgcggaccatgctgaggcacatgccaaggatggtgccatgaatgccgcaagctatgacgcacgcatagatgcagccatggtcaatgatgacatgaacaccgacaacatcaacatggacatcaacactggctgcaacgctaactgcaccactaactgtgttgatgccattgatgacgacattcatgacatcgagggcatgatggcaaccgtgcatacaactactgacgccatgactaccagcgataggactgtagacagagactgaagcaatgactggaccggcagcttgaacatcattttcaacatcactggcagcagcaatgctgctggcaaggctgttgctgatgtgaatgccgagc

SEQ ID NO: 459356 - DNA, 393 bp, Sorghum bicolor
cgtccgaactaagttaggcaaagtattcagtaggagctgcaactgtatctggctgcacatggatcatagcttgtatgcatagatatttatgcttctctaggctgataacatagctagtatgagatcatctgtctaatactactaacagcttttgttttggctctgaaatattttctgcacttaactgaattatgactttattctgtgatatccatagcttgtaagagatcatttctataatactactaacagggaatgtttcggttctgaaatactttctgtagtgaactgatttatgactttattttctgacatccattcaggtggacaggtggctacagccatgagaatacggcatcatgcacattttattcgtaaaaatattagggcaca

SEQ ID NO: 459357 - DNA, 469 bp, Sorghum bicolor
cgtccggcagtatataagcaggtcagcaacaattcggcgtagacatctagacgtggactgtgctgactaaccttgatgaagctaataagttatatcaagtgtttgtggtagaaacagagaagcattcttcagtggtctttcaaagaagttaacaaaattttgaatgccggagttatcactgaaccagtctttttctttgacggagcagtccttccagaaactgaggtgccctatcatctgaaattttatctattccctacaggcgttatattgttcaatgtgtgtctcgagctgtacaagagttcagtctacccacgagaattggctgctgggcagcgatctgtgtgactgtcatgcgagtgcgcgcagcgtcaggcatagctggctgggtgttaccattccacatctgaatatttattgcgatgcaaatgaaagtggcctactagttaaaaaaaaagctgttgtttgc

SEQ ID NO: 459358 - DNA, 241 bp, Sorghum bicolor
cgtccgcggtgtactacggcacggcggcgagcgcggcgaactacggcgggtacggcgggaacgcgagcaagaaggacacggcggagtacgtgtacgacgtgccggaggggtggaaggagcggctggtgtccaaggtggagaagggcaccaactgagattgcacagattgctacagatcatgaaaaggggagcacggagcatgacggaaggaaggcgtccggtttcagacatttctagatgt

SEQ ID NO: 459359 - DNA, 369 bp, Sorghum bicolor
  unsure (1)..(369): unsure at all n locations
cgtccgcgctacatggcacaaggtgagcctatgttaagattaaattaggtatgttaagattatattagctatctatgttctgtaaatgtgaagattcgtgaatgaatatgaagctcatgttattaggcatctgtattctccagatcttactaatttgggattgaattctaagttaatttatgtagctcttgcaaaacatattctttctcatatgaaagactgttagtaatagatagtcgttgcatttattaactgctagactgctggtaacctgccctgctagtatgtcattctatcttatagntggagatgtcttggtttatgtcacgggaaggcaatctcaatgctcatacaagaaaatggggtttg

SEQ ID NO: 459360 - DNA, 320 bp, Sorghum bicolor
tcgaccacgcgtccgaaaaaaaaaaatataaaaaaacatataaattactaataatacaataataactatacaatgaacaaaattaaaaatcataatgggccgtccgttaaggaattggagcccgttagttttctaaaatttttgatagctcaaatgggggtcgccgaacagaaagggaagaccttgtcgtttcggattacctagccgattaggaaaaccgcgacttcaattaaaggggcttttccgcctttggagaccgccccggcttcggcaaagccaaaggggaaggcgatcctacaggggaaggccctctttacttt

SEQ ID NO: 459361 - DNA, 205 bp, Sorghum bicolor
aaaaaaaaaaaaacaaaatacacacaacacaatgcgtgtgaaggaccggatagacggcgcgaaccgtgtgcacgcgctggtgaaggagaagttcgtcgcgctgacggttcatttccttgccgtcctcaatttgatcgtcgccgccatggtgttcatgggctgagacgatgcgtacctactctttttgactagccgaggtctattt

SEQ ID NO: 459362 - DNA, 366 bp, Sorghum bicolor
tcctggtcgacccacgcgtccgcggacgcgtgggtccaaatccacgccaccagccagcagccatggcaccacccatctcctccctgtcgtctctcgtggcgtccagccagaatccgcgacgccgctgctcccgaggcccagcagcagagcgctcgccgtcgcgccctgcagctccgcgtcctccgcctcctcctcttcctcctcggcgtcgccgtccacttgctcggctcctactcgccacgccgccgccgcgccggcggattcggcgggcaggagagggctgctggcgctgggcgcggagttcctggcctcggccgcgctgctgatcccggcgggggacgccggcgccacgcgcgttgagtgcta

SEQ ID NO: 459363 - DNA, 280 bp, Sorghum bicolor
gtcgaccacgcgtccggcgtggtagcacgagaaaggagaagccaatagggccaccatagctcccagagcagcggcagaggcctcacctgaagctccgtccggcatggcattcacgcccgctacggcctgctgcaagccttccctggcgctggcgccgcgggcggcgtcatcccgcgcgcatgctgcggcgctcatatgcacgccctacacctcaccgattcgtggacgcacgagcgagaggtccctggcgtgccgaaccagtgcatggtgttcacaaagg

SEQ ID NO: 459364 - DNA, 489 bp, Sorghum bicolor
  unsure (1)..(489): unsure at all n locations
cgtccgcaagaacgtacgcttctctcggcgccggctttctccccccgaactcgaccgtcccccctcaccgccggcgaagaagatgcacctgtggccatcgctccggatccgcgactcgttcaagcacggctacctccagaagctggagctcaacctcgggcacatgaagcgcgcgcagcggcagcgccaggggcggcagggtgagggccaggaggaccaggacggcgagcccggcggcagcgggaaggcgccgctgctcgaggaccgctctccgtcgcggtccgtgctggccggcgcgctcgagctcgcctgggacgccgtcttgctcctcacctgttgctgctgttgcttctgctgcggagcttgtagcgatgaggaggatcacccaactgcccgctaagaagcgccttcagggggctgataattcatcagatcaggaaaaccagataatttgtgggcataatgaatngcagtcaaataggttaaata

SEQ ID NO: 459365 - DNA, 476 bp, Sorghum bicolor
cgtccgacgagcggctgcaaccgggggtgcaaggcgtgcgtcaagtccatcagcgacggcctctacgagtgcaaggacaggatcgtcaacttctgcaagcgccgctgcacccgtcctgctgctgctgctgctgctgctgatgcgtgatctgcgcggtcgtcgtccgatcccagagccggcaaatgagctttgccaataaataatttccgttcggacttcggagttccctttttgcatctttctcaagatgcagacagggattgaataaggtgatgcttgctgttttctgaaataaagagcatgatgtgttatgctcggagttctgtagtcatgggaggtagagaaaatgtaataatcgctgtgattatgtgcatctttagatgccatagaccgaggcatgactagctaataagcgcatggctacttgcatgtctatgatgcaaaggccgtgatatggacatgtctatttcatataa

SEQ ID NO: 459366 - DNA, 453 bp, Sorghum bicolor
  unsure (1)..(453): unsure at all n locations
cgtccgccgcatcactacacacaaggttacctcgggagcgagaccttcacgctcggcagcgacgccgtgcccggcatcggcttcggctgcaccaccatgtcggagggcgggtacggctcgggctccggcctcgtcggcctcggccgcgggccgctgtccctcgtctcgcagctcaacgtcggcgccttctcctactgcctcaccagtgacgccgccaagacgagccctctcctgttcggctccggcgccttgacgggcgccggcgtccagtcgacgccgctgctgcggacatccacctactactacacggtaaacctggagagcatctcgatcggcgccgcgacgacggccgggactggaagcagcggcatcatcttcgactccggcaaccacggtgcgttcctcccnggagccgcgtacacgctggcccaggggagggcctggcgcgacgac

SEQ ID NO: 459367 - DNA, 465 bp, Sorghum bicolor
  unsure (1)..(465): unsure at all n locations
cgtccgatgatggcaccattattccaacatgaactccactagattgttaccaccacctacttgagtgtaaagaaccataggaagcttcatttgtgagctttttttttgtatatgaacaaaacaatgtttggaactgagctgtcatttgccaggcaatttgattccatgctttgaggttcaaattgatctgtgggtgtgggtgtgggtgtgtgtgtgggtgttttgagtngctccagaatttactgattggcttggcttcagaggtcttcaatcttggcatgcagcgttgcatcaatatctcccatccgcatgtctactcctttgctgttactctatattattttgtttcggaaacatttttttgtagagaagatagtgaggcaatgccaagtgttcgcctatatttagagggctccagattcgatgggccctaggagggatgtaaaccggtgctaacatggccac

SEQ ID NO: 459368 - DNA, 260 bp, Sorghum bicolor
ttcccggtcgaccacgcgtccgcaccaagcctcaccagcggcagctgcagctccaccgctccatcgtcatccagcagctcccactccgtaatggtcactggcggcgcggctggcattatccacctgctccagctccataccacctacacgtctccaactctgcttcatattctcaacttccgtttcctatccacagcaaaccgcctaacgttgctctcttactgcgttccaacttaccattctaccttaatccgcctgct

SEQ ID NO: 459369 - DNA, 139 bp, Sorghum bicolor
cgaccacgcgtccgtgcacctccgatggcgaccacggtgatggccaccacgaccgcgagctccctcgccttcttcggacccggcgctcgcgccagcgccggcggcttccccagtaccactaccacccatcttcccgcgg

SEQ ID NO: 459370 - DNA, 369 bp, Sorghum bicolor
cgtccgagcataccaagctagctagctactaccacatcgatctgcttgggggggctgccaagccaaggaacaaacaaagagctagctagagtctcgagaagctaagcttctcaagctctcgaggatgtctctggtaaggctgttggacacgctggctctggactcgtgggtgcggaacccgttcagcatcttcggcacggcggtggccgccgacgcgtggctggccagcgacacgtcggcgttcgccaacacgtacatcgagagccgggacacggcgggggcctacgtgttcagcgccgcgctgccgcccggcgtgaggaaaggagaggtcacggtggcgttgtcgaggtcatccttctcattttatct

SEQ ID NO: 459371 - DNA, 415 bp, Sorghum bicolor
cgtccgctccgtgtcgcccaacgcaaaaacctgaccgatggcggcccggtgctacgcagctgcctccgtggtcagagcaggagcgcacgacctctccctctccccctcctccttttccgtcacagccgcggcgcgtccgaggccggtaggaggagtgtgggcctgcggtggagccggaggagggtacagctggctccgcgccgtccgcgccatgggctccgcgccgtcgtcgtcgtcgtcgcaatccccgtcgccgcaaacgccttcaggacaaacccaagggaaagcagattatacatcactgagtgaagaggagtggaagaagcgcctgactaaagagcagtattatgttactcggcagaagggtactgagagagcattcactggggaatactggaatactaaaaccccaggc

SEQ ID NO: 459372 - DNA, 160 bp, Sorghum bicolor
gatcccggtcgaccacgcgtccgcggacgcgtgggtggcggtgtgcagcttcaagatgtaaagcctaatccatccttaggctcttctatagcagtaatcggggaggattgatcgcttggtgaagctcttgaaccttatcaataaaaccttgagtgttccg

SEQ ID NO: 459373 - DNA, 172 bp, Sorghum bicolor
  unsure (1)..(172): unsure at all n locations
tacagaacaacgagnatcaagaactactggagaacacacatgagaaagaaagcacaggagaggaagatgagcatgtcatcaccttcatcctcatgctcctcactgacataccaagcctgccatcttgacactgttccagcattgggatgagcaggtgaactacatggggtgg

SEQ ID NO: 459374 - DNA, 294 bp, Sorghum bicolor
  unsure (1)..(294): unsure at all n locations
ttccnggtcgaccacgcgtccgccgctgcgtgcctccgactccaccgattccaccgcgtcatctcgtgcttcccaattcccatagcccccggttgatccccgtccatgggttcctccgccgccgcgtcgcctctcgtagccaccgccgctgactctgcttcctcctgcgtcgcccacctccgctgctgctcctgtcgcgttggttgttgctgttgttgttgttgaaaacccgtanctctctaaggttcgttatttctcgccgatcgattctggaattggtaagctatggatctc

SEQ ID NO: 459375 - DNA, 271 bp, Sorghum bicolor
cgtccggacgggatgaggatgagtacgagggcgccggggcggtgatacggtcgcacctgctctccgacttcaaggccgcgctgtcgaagaaggtggtgaacatgggagagctgcagcgcttagcctgccttggcgttcccgacggcggtggcggtgtccgacccgttgtctggaagcttctttggtggtatcgccaactgatcgttcctcatgggcttatgagttagaaaatgaggcggggtcaatatagtgcatacaacagaggagttct

SEQ ID NO: 459376 - DNA, 400 bp, Sorghum bicolor
cgtccggctccatcatgcggcaacatcacatcacacaaactgtgctatacgtttagcatttgatagaattcagacgatcgacatgccgctcgccctccagctgcggcttccactgccacgtgtcctcgtcgtccagcggtgcaggtgcaggctgcccccctcacgcctctctgtaagggcagaagcggcggccggggtggcagtggcggcagcagcagcaccatcgtcagtcgttcatgatgaactgtgcatgctacccttctcgccggagctcgcttcccaccaccgtgagctcgccgctgctgtcgcctccgtcgagcgagcctgccagctatgtgtcgatgtgaaagcatcgctgctttcaggtgacaagaaagttcttgaaaagaatgacgaaact

SEQ ID NO: 459377 - DNA, 345 bp, Sorghum bicolor
cgtccggccgcactcactcccgcatcattacatggcgcagaactgcgctttacgctaagattgagacagtactcaaacaatcaggatagacgttgactgccatctggatgttccactgtcaaatgacctcatgttccatggcagcatgctcatgctgccgcctatacacctctatgatagggcagcagcggcggactccatgctattggatgcgatcggatacatatgcgacggcaccaacgacacaacgggcatgctatcgttttagggcgagctgggcatcgaggagacatagctggtggctgatgctgcacgcgcgtagcgagtctgccgtctatgcgcaga

SEQ ID NO: 459378 - DNA, 59 bp, Sorghum bicolor
cgtccgactaatcatgcgatgatactgtgcccgcctgagttatcaaggaaggatggctg

SEQ ID NO: 459379 - DNA, 172 bp, Sorghum bicolor
cgtccgcggacgcgtggggtcccaggcatccgctgcgactacatcggctccgccaccaacctgatcatggtgacgacgacgacgctgatgctgttcgcggggcggttcgggctggcgccgtcggcgaaccggaaggcgacggcggggctggaactggagcgcgcgactcgct

SEQ ID NO: 459380 - DNA, 381 bp, Sorghum bicolor
cgtccggtaaatggacatagttgacaagttttttgtgttgtgttccacagatggtcaggctaagagtagtgctatcggaaagggatttgtaaagattttggattcgatctccgctcccccagcttttgcaggagaattcccagctaaccaccgcaaatccttggctcatatttctggagcgcgccccaacacactccatgtttctgctgaagtgatccgcataggaagcttagctgctacttctggcgcagacaagtgggctctggaaaaggatcaaggcatggagctgctcttctctgcagattttgagcctgatacccgtatacactgtggctgcaacaccattaccgcggtgctgcgtggtggcttctgactttcttc

SEQ ID NO: 459381 - DNA, 86 bp, Sorghum bicolor
gatatgccccactgcaccttcatggcctgagtcagggttgggcgggttcccctacacagaatgacgtgatgttgctgatctttctg

SEQ ID NO: 459382 - DNA, 191 bp, Sorghum bicolor
cgtccggccaagcaaagttcaaaagatattaaaagcatgagcctctgtgcttcgtctaggagctgcacacaggatgataatcaaggtgttacgcttgacagatctaggggccgttaaacattcagtgtctactgttaacttaacacatgatgagacacgaggtgtgaattgatggccaattaaatctgaca

SEQ ID NO: 459383 - DNA, 442 bp, Sorghum bicolor
cgtccgctcccaccaccacatcgtctccctcacctcctccacctacggcatcctcaccagtccgcgagcctactcctcctcctcctcgtcgtcgtcttttaccgccaagcccgttgcccttggcccagagccgttcgctccgccgccgaccactcgttgcgcgccgcctcctccccctcctcctccgctgccgcctccagcaagacaacaagcacccccaccaccgaaacccgaatcccagccccaggcggaggtcatcaactcctgggagctcatggccggcctcgtcgacccctccacgccggccaagcccaccacgccctcctccggcagggaccaccagcgccgtcgccggatccctctccgcgccatcgacggcaactcctccgctttcaaggcaagcccctgttcgtcctccccgtccgcggttgtgctctacacc

SEQ ID NO: 459384 - DNA, 460 bp, Sorghum bicolor
cgtccggccgccctttctattcattttctttctgctgggaagggccactataaccacggaccagtaatgattccttttcccgctaataatttaacaatgtagcagttataatgaaaccatgttaagaaaaaaaaatcggcttcttactagctattggtgttctcataatgactctgcctgcaacaactccagcttattggtatctgactctgacaatccccagagccttctatgatagcggagcttagacacctgcctgccctttgacacacagaacccctcaaaagatatttagttcacactacaaaatacattgggcgttctcttgctcacggaccgggtactatgctgcacttatcaattcaaccaataatatggcgcaatctgttgacccacctgatggcccacggctgcatcatgctccctcctcccactaggccttaaggtcatccgacattgc

SEQ ID NO: 459385 - DNA, 184 bp, Sorghum bicolor
cgtccggccaagcaagctagctagctaccatgccatgcatccatccatgacagcagcacagctccatgcatcatcatctgttatactactctcttatttataatccaattttacttcggatgcatgatatgatatatgagtttcactatgctcaagcaaatcaaataataatgttttttttttc

SEQ ID NO: 459386 - DNA, 272 bp, Sorghum bicolor
cgtccggcctcccgcatagcttctgctgcactgcgggagagagacgatggcgctcgctccaagaaataccatgcacacccaactcaactcagcctggtattactggttcgcgaccaaaacgtgcaccggcttgactgacaagatcgagtccatacacagctgaagcctgaccagtaaccaagaaccgcatctgaagcgtccgatgacacagacatcagcaacgtgctcgacacgtggtacggagcagacaggaggagctacctgacagatgg

SEQ ID NO: 459387 - DNA, 377 bp, Sorghum bicolor
cgtccgagcacacgttgaggttccctctgtgcaagacatgcctatgacagtcgcattcggctaagtgaaaatcattgatgatgtcctgcacgaataatgctcttaatgaccaagcttacctaattctagttacctggaggaatgcatggagcgggagcatatgcctaatatgatgaactaacggatctcagcatgaagcaagccgtgacaattacatagtacggagctatatatgcctcccatgcgaatgctttcgtaccacatcggactgctataaagtaaatatacgctcacatactatcctgctgttggacacatacttgcctaccacatcgaatgcgacaacagagccgtcgaagctggctacctaaccacga

SEQ ID NO: 459388 - DNA, 354 bp, Sorghum bicolor
cgtccggccgaaatcccacaggcagatggggaaggcatagttctggaatacagtgctgggcatgagatcttgaccattggcgatggagcagatgcttggaaacggaaggctaccgtggacccaccttatgctatcagtgccaatactccgattcgtctacctgggttcttctactgtagtgctctgcactgcatcaccagacatggcatgcagcgggtcagttcacatgtcatcctaaagtttaacttgcatgatgaaacgtgcaccgtgcattcccacccgccaacctatgggtttctaaccaataatgacaccctgtgcaatcgtggtggatagctatgctatgttgggtct

SEQ ID NO: 459389 - DNA, 311 bp, Sorghum bicolor
cgtccgagtactcgtggcacagcgtatatagaacctattgatgtaaacatgtatattaatgcgtaattcggcatgtgcgacttaatgatcatagtaatctttacatgggatgcgttcattaaaaaccacaaggcaaaaggccggccagacgcactctacacctagtgcgcaagtgatgcactatgtggagctcgttctgctgccccacacggagaatggctgactctacggctgcctctcaactactctacacctatcatgatgccacgatacctgagattgctggctggaccacgtctgactttgctggc

SEQ ID NO: 459390 - DNA, 504 bp, Sorghum bicolor
cgtccggcgactttgtacaacgccctttgatagacatttagcattgagctcctgcgtgtatgcaccaagagacaatcaggcatgtcttgcacctgaagatacaagctgcacctgcggctcatgctcaaagtgcagcaggtaatgctcggacctatcagacacgagcacctcggcacactcgacatgctcattttgtacttccaggccgaacagagcaagacgccactcggcgcgctcggcctatgattttgcattgcatgctgccggtgccgacgacgaccgtgtcgtgtcatgctgtgtacttgtattcatcgatcgatcgaattcgaatcgaccgagttaaattctcgattgggcgcgtggcgtgggtgagggacgtatggcttcatcttcatcggatcaaacgcattgaaatgcatacaatggatcaagcttgccttgcttgcatgggattgattggatatctggattggagatcaaagaagagcgtagcagcaatgtact

SEQ ID NO: 459391 - DNA, 464 bp, Sorghum bicolor
cgtccgagcggagaccggctagcgttgttcctgaaatctgttgattgatggggagtcagacaatggcatcacaggctgggggaggtggtggaggcgtgggtggcagtggcggtgccggcgcagcgcaacgtgggcagatgcagagcctggcaagacaagggtctctgtataatctcacccttgatgaggtgcagagtcatttgggagaaccccttcacagcatgaaccttgaggagctgctgaagagtgtctttcctgatggcttggaccctgatggtggcaccaccagccagtatgagcagagttcgggcctctatcgacaggggagcatcacaatgccgcctgagctcagcaagaggactgtggacgaggtgtggaagggcatccaggatgcaccaaagagaaatgttgggtgagggtggtcggcggatgcgggagcggcagccgacgctcgtagagatgac

SEQ ID NO: 459392 - DNA, 74 bp, Sorghum bicolor
cgtccgctattactctatcaacgaataccggcagaggaaccgcgcgtataaaataaacataaaagggccgacga

SEQ ID NO: 459393 - DNA, 422 bp, Sorghum bicolor
tcgcgtccgacaagatgtacgaagcatctgccacctgctcggacaggagcgccgatgcatatgccgcgtagaccgacatcactgacgtagcaaatgccactctgtcagtcaccatgtacgtggaatatcctgatctgaaggacatgatgtacaatctgtgcggctgtgccgactcctattgtgagagataggcagacccgtgatcgatcgcgcgatattccattttggcacatcatatatccaactctgttaccacagatcatggctgataacatgccccaccaagatgtgtagctgcgagctgaacctacggtgacgtatgatgtcctatggtcctgcggttaatgatggtgaatgttcgttccctaccatcttgcccatgctttgctgataaatgtgccttttcttgcaaccaacggcgt

SEQ ID NO: 459394 - DNA, 128 bp, Sorghum bicolor
cgtccgatttcccctgtgtaataatatccggtcctttggtgcaagggagtgaagagctgaaagtggtagtctagcccctgtacaaaggcatggcaataaaactcagctcccctcttgcttggcatgtt

SEQ ID NO: 459395 - DNA, 466 bp, Sorghum bicolor
cgtccgttatagctacagcatctgtgcctagatcacagtctgcactatttcagactgattgcaccagagatccagacggatctggcgatgcagagatactagggtctcgttgcacatctgacgatggcttatgttcactgattgacgagaagcttgactacctgagcggaggtgaaatgcatcgcagtaaaccgagtttggatgttcattgtgcaccttcttctccaaatgtgtaccgggcatcaaacattgacgaccgtggttcagtatgttgctctgatactgctgcagagggtcaacgggccactgaaagcacagatgaaacttttgtcagggatgggatcctagtatgtcatgaatactgcggtggcaaatacatttgtggcgatcactcactggatccagttggcactttctgtgcacattcaggggatgtttatcaccatactgtgattgcggtgtcctc

SEQ ID NO: 459396 - DNA, 507 bp, Sorghum bicolor
cgtccgcccttcctcgccatttccgtccaagtgttaccccgaggagtcgtgcgttagcgtgcctgccgggttgggtaggcgttgcggcggcggcggggcgggagcatcgctggccgcgcgcggcggagcccggtgctcgatcgagtctcttctcttctcttctctccgggagacgacagcctttactgtgacaatctcatataagatagtttcctatctataatgtgctcatataaagaaatcaagtacaaatgaagaagcacatctctgcccactatttgatgactgaagacaggtagcactatggtagctgctacaactggcgggatgtttcttgtgtgttttgagtccctctgcccctgttttcgctcaaaaaggaaggatggaagcgaagaccatgttcttgcagaacattccaattccttgaattcttctgaaatgaggtcgatttctgatagaattcctgcaagcccgcttcgagtacctgcaagtccatctagattttca

SEQ ID NO: 459397 - DNA, 251 bp, Sorghum bicolor
cgtccgatttacaagatgaagttgcttccgaacatttagaacaagagagtaatcatctaccagttgcagtcccggcggagtaccccggcgcaccctgtgagcgcaactctccagatgctcgtgatgatgaactatcgattgagagggctactcggcaatatgatcaaagctgacgtacgcgagcatgcgacgtacaggctgaggtcttgagtgacatatacacaattacatgacaacgggcagacactgct

SEQ ID NO: 459398 - DNA, 437 bp, Sorghum bicolor
cgtccggtcagaagataacgaggaaaacggccagcccatggatgaggattatgaagagcatgttccagattactcagtgggttattctagtagatccaggcaccatggaacgatgtccatgatggatcatgagaccgacgaggaggatgacgatgctgaaggtgatgagaatgttgaagaagatgatgcagatcaagcagttgatgatgccgatgttgagatggatgaagatgatgagattggtgatgatggagaggacggcaatctcggaggggagatgaatgcggatgaggatccagatgctacttcatattcatctgactacagcgaataagaaatcataaataaggaccttatcacagatccttccttggcatgaagcagcgatagatgcggtactgaagaactgatgttcgatgggtgggatgtccattact

SEQ ID NO: 459399 - DNA, 511 bp, Sorghum bicolor
cgtccgcaagtggcaataatttattaaatggtagtcttcagtaggaaaaaaaataaaaagggcacaaaatgctaatatggttgttgtcaattttttttatcctgcaaattagtgagtactcaagttccaagataatgagttactatatagtgcttgcctgtgccactactgcaagtctgcaactatatggcattattaggcatttggatatctgtgttatctctgccagtactgccaacatcttccttacttttttgttacctaagggaccaaccttgcttgggggatacaccgtctgaatccatgcaccaatcgtcaagttttggcatgcaaccatctcataacaaagcataaactaaagcatggtctgcccacaaccaagtactcaagtatatgaaataatggtcattcctgaatattttcaagttcataattttattggtaagtgatcatatctgcttgtagaattaacttctacttacaaatacaaatttcttgaaataataaacat

SEQ ID NO: 459400 - DNA, 180 bp, Sorghum bicolor
cgtccgctcctcctcctcctccccctcccccctgttgcttttgcttgcttgcggttgcaggcagccgctgtgccgcgaccgcgagcgacctgtgtagtagggggagggagggtcggagggagcgaaagaagagaagagaagagaaggtttggtggttgtttggtagaggagaatagttgg

SEQ ID NO: 459401 - DNA, 318 bp, Sorghum bicolor
cgtccggacagactgagagcggttcttcgaatctatgggtggagatgcatatccgctcgatagactgtgactggcaagaccatgaccctcgacgttgactaacgagacacaatcgtgattgctagggctgcgatgccatacatggagagattgctgccgaaacagactatcctgatctatgctggcatgcataattgaggacaggcgatcgctatggtgactataacatgcagacaggagtgcgccctctgccttgtgctctgactgacggagggcatacatacatccgtgcacaccctaactgcaaaagccactaca

SEQ ID NO: 459402 - DNA, 481 bp, Sorghum bicolor
cgtccggtggcagcatctccttgctggtgacaaacaagaccgtgaataagcaggtcaagcaatttaggggtctcttttcaaccgatacaagtgtcgtaaggtttgaagcatcatcttttttctcatggctgcaatcgattatttttccctcttgttgtgttccaacacatgatgtatggaagcattatttattccctgaatttgttcagtatgaattattgatacatgctttaatattgctttaattgtacctagatccacctggcatagatctgcttgctttaatatatgtacattgtttttcccttatccaatggaatttttgcctgcttgatgtcatggattgtagtaatcttttttttgcacgcatcttggttactagcagcttggttgctgtagttttggaagtgaagtgtttttttttctgtaataacatgactggtgaaatgttcctggtatttctagcctccgatgaaatgac

SEQ ID NO: 459403 - DNA, 382 bp, Sorghum bicolor
cgtccgaccctatgcagcaacggcgcgtccaatcctggtggccgcacggccaggcaccatcagcacggcggcaaccctgtctatcagccgggcggcaaccctgtgcagcaacgcaccatcagcacggcggcgtcggccccttcccttcctcaggtctggtaaaagaatttgattcaccgtcgaggttaatcgaacaaccgtccctcttcagtgcgatgattcaggagtatgccaatcgctcgtcgagcctgtaaccgtgccatgatactcatgtatcaagaatgcacagcatgtatcaagcctgctagaaatccaagaatgcacagaggcccctggctgcagtgcatcccacacggatggcaccccagcagcacgtcacaat

SEQ ID NO: 459404 - DNA, 124 bp, Sorghum bicolor
cgtccgccgatcctattgtgtaagactttccaatcggagtaatgattaatccggacagtacgcggcattcgaatctaataatcatacaggggagggttagatatatgaaagagaacaactgaga

SEQ ID NO: 459405 - DNA, 348 bp, Sorghum bicolor
  unsure (1)..(348): unsure at all n locations
cgtccgcgttgagtgtgttgggcggcgcagcaggaggttccaactgatgcggctctctccttggctttctgtcggcatggcaggcacaagtgtgctgcgtgcaacatcagggacgagcgaggtgccacggtgagcaagcggacggcttggccaggtgagcggcttgtaagtcagtggccctcgacgccgacacggcgcgcttcatcccgacttcgcctcgatcgagcactgcgcctcatgctgagtctncggagacatacgcgatnctctccgcgcgtgaggcaagtcgctctgaccagcgtgaagctgcccacaccagagacgcgagcagcctcctaccacgtcttc

SEQ ID NO: 459406 - DNA, 305 bp, Sorghum bicolor
  unsure (1)..(305): unsure at all n locations
cgtgcgctctcctccctctcgatctcgccttctccagctaacacagctttctagggcttacaccggccgccgcagtcccgagccggccgggcgtcgatccacatcaccattattccatctcctgatatcgatcgagctcctncctccctccgggctgaggcgccggacgaattccggcgcgtcgagctcgctcgcttatattagcgccggcgcggcggcagtcggggccatatctatagccggagggggccatatggcggaagctatttgatctctgatctgagctgaactggggaaggaagtgt

SEQ ID NO: 459407 - DNA, 456 bp, Sorghum bicolor
  unsure (1)..(456): unsure at all n locations
cgtccgtggcttcgctcctctgccgctccgctcgctacccgctttgtctgcggagaagcctccggcgaacagccgcgccggccgagatgtctgctccctccgcggaaccacccccaccccgcaccgtgatctgtgtgggcgacgtccacggctacttcacgaagctggagagcctctggtccaacctcgaggccgtgctacccgccgacgccttcgtcaccgcgctggtcatcttcctcggcgactacaacgaccgcggcccggacacccgcagggtcctcgnacttctcctcgcgctcccgacgcgccaccccgcgcagagccacgtttttctctgcggcaaccacgacctcgccttcgcggcgttcgtcggggcgctgacgtcgccgcccgacagcttcacgttcttggccacctgggacgagtgcatctactacgaggagcacgaaggggtgg

SEQ ID NO: 459408 - DNA, 64 bp, Sorghum bicolor
gggcgatggcggcagcgtctgcgtacgtggctaccgtggcctgcatatcatccccaacatccag

SEQ ID NO: 459409 - DNA, 416 bp, Sorghum bicolor
cgtccgaaaagatgctcagagtgaatctccagagaactatgggtttgccgccatagatgaagatcccaagttttcattgtcaaaacggtacaacacattataccggaatttgtataaaattgcagcaaaagcttcagaaagcgttgaagcttatgcattcttggaaagccaatatgaacagcttgttgaacaagtggaggtacttttgcaagcgaagttgcatgataaatcttccttaagtactgtcctgaaaggcaatcagccaaatctgcttaatagtgaggtaagcagcagtgaacatcgcagagcaactggtaagaagattaaaaatatagaggtgcgccgtcagcaacaaagtcctcttgatccaaacaagaagaaaaagggtagacaaggtctgctggaacctgaggaga

SEQ ID NO: 459410 - DNA, 508 bp, Sorghum bicolor
cgtccggaatcatcagggacacgagttaattaacggtttttctgtagtaaactttggtagtgataatccgcaaacttgtgaggcgtgtgagcagtatgtacgaggagcgaggccagattttcgttgcgcgacgcgacatctgacactgatctgatgcgcgcaagcatgacaccgaccgcagtaccggaccacggcgctctgtggtacagactgtacagtacagtacagtacaaaacccgtagctgccatcagataacgcactagataattagatgtgcggaaaagggaagaaatagtaaaaggagctagcacatcattaaatcgaaataagaaacaaatactgtactccaaaagggtcgttccggcatccatcgatggttcaagtagcagcaaccatactgtacatgtatattcatatttatatataggagtgcatgattaagccgcgcgcggttcctcattagcacaccaacatgatggggtaagcaacaaattaagcacggcagcg

SEQ ID NO: 459411 - DNA, 402 bp, Sorghum bicolor
  unsure (1)..(402): unsure at all n locations
cgtccgcccacgcgtccggctgagagccttctcccacggcgacatacttagcatggccggcttcgacccctgcatgtcgtcggcctcgtggggcgcgtacgagcaagggcaccaccaccaccaccaccaccagagcagcaagcagtggcatgtctagacatcatcgtcagtacaaatatatacgatcccatagctcgctcgctcgccatatcctgaatgagctgcagcacgtacgcatgcaaggaccttgctcgatcatattggtaagtcggatcatcgatcgaatccagttcactgtnttgcttggcacttactctgatacgagatgttcatttggngggtatgggcatttcaattcttatatataaactttagtcaaggtgcaatatatatatggagaac

SEQ ID NO: 459412 - DNA, 86 bp, Sorghum bicolor
cgtgcgcgaagatactcaaagaacacctgataatggaggtccataccctggtggctacccagcaagggatgatgcttatcgcactg

SEQ ID NO: 459413 - DNA, 306 bp, Sorghum bicolor
tttttgcatagctgaacgagaactcccgtcacgagatgctcaaatcatcacaatgaaatcttcatcttttcagtttactcaaaatgatcaatgaattagattgagtatttacagcttaagattattcccgacatcttcggggcacccctctacatgttgtacaaaaagaacaaaacaggaatttcaactacaaaatcgtccactcactctcgtcaaatggcccaggcgaagatgaagtgggtgccgctggcacttccggcgaattcacattcttctttgaaaatatgttgaccttcttgtcaaaaa

SEQ ID NO: 459414 - DNA, 306 bp, Sorghum bicolor
  unsure (1)..(306): unsure at all n locations
cgtccggagatgatggcggacgagcgcttgcctcaaatggccggcgcccgcatggttctcgctagagcggctggatcctccgcacggaaacgcgcccgcggttgattaggtccgctgtgggcccccctggctcgccgcgtccgcgcgaggcgtcgtcgtctgctgcggcggcggcttgtggttatagtggactgtggagtactgagaggacagcangcaggcgtcacctgcgtgaatggtcatcatggctgggatgctccccggcgtggagtgcgcgcggcggcggcggcttccgcagggtgcgga

SEQ ID NO: 459415 - DNA, 371 bp, Sorghum bicolor
cgtccgctggtaatgaacatgagaattgcaatgacaatgattccgagaggagtagcattacttcaaattcctgcgctggcgatgatgatagagatgaaattttgccagatgagtcgtccagctgcaactgtgagggcaaaactgtctcagaagcaacaacgtctgaaacgaatgtagatccagttggatcctctgagagagctacagtatctaatgaaagaaagccatttatcaataagctacagtggttcttgaggtttggcagaccttcaactgaaggcaatgcagagaagggcattgctcaggcatcgaatgataaacatgatgcagttattccctgcccttcacctgctgatgtgagttcagataac

SEQ ID NO: 459416 - DNA, 377 bp, Sorghum bicolor
  unsure (1)..(377): unsure at all n locations
cgtccgggtggcatctgagacaagcattaccatcagctaatgcattctgaaactttgccttcactcggtgccatttacaagctaagaactgacgggaagtactgaaatcaagatcacatctgtgatctgttgatgaacagaaggttcatacaagtggacaagctcgttgatttttggagtaaggtgaattctgggcaggacgccctgcctatctttgttcagtctacaacgaacggtggccagtttcacgactatggtgtaatataatgtaacattacatatatgtttcctggtcataactaattactngtttgtggatataaacagatgaagtaaactcgtttcagatgacactattggtttagaggttaatactg

SEQ ID NO: 459417 - DNA, 289 bp, Sorghum bicolor
  unsure (1)..(289): unsure at all n locations
tttcacagacgcattaccatctgatgaaacattatctaacttatcctctactcgcctccatgatcattctaagaacggacagggtgttctgcaatcgagatcacatctgtaatctgttgatgaacataatgttcatacatgtggacatgctcgttcatatttggagtatgttaatttctgggcaagacgtcctgtctatcttttgtnannctacacgaacgtggacagtttcactactattgtgttatatatttaaacattacatatatgttacctgttcatactaatt

SEQ ID NO: 459418 - DNA, 315 bp, Sorghum bicolor
  unsure (1)..(315): unsure at all n locations
cgtccggtcgccgcggaccagcagcagcagcagcagcagccatgtcgtgctcccacctgtccaccgcctggtcctcctcggcgctcgccagcgagcgcctncaccacccagcggcgcggaagcttcgtcccgtgctcgggcctggtggtatcctctgcttgagccgccggttgagggtatagcggtctgtggagaactgagaggacagcaaggaggcgttacctgcgtgaatggtcatcatggctgggatgctcccccgcgtggagtgcgcgcggcggcggcggctccggcatggtgcggaggcggtccgaagag

SEQ ID NO: 459419 - DNA, 366 bp, Sorghum bicolor
gggggtgggttttacgacaactagtgcgatagtagattcatgggtcattagtagcggctactgcagcttgttaccagtagtatacaaattatacatggctagtttacgcaagggcttgctcaaaaagagagtacatgggattactactccttcctatacattgatacaagttcaaggcgcgcgcgcgcgcgcggtgttccttggcggccatgcatgcatgcgcgcgcgttgggacctccggccggggtgggtctatctagaactttataatcttttttcaactgcggggccgaaggtggtcttcttctatatccttttctgtttttctttatctttggtagtaattttcattttcttttatctcta

SEQ ID NO: 459420 - DNA, 509 bp, Sorghum bicolor
cgtccgcggacgcgtgggcaaaaactaatgcatttatatccccaatgtggggaggtgttcttatctggaacccaccggactgctgcgacttgattccaagactcatggtacccgtaagaaaatgtcatctcaggaacttatggagaccctcgaaatcttcattggacaactaaggcagttgtttggtctaaaaccatcttatctctcacaagatatggacgtgccaactaaatttgtagttagtgaaaaggggttcacagaatgggagttagatttattatatcgacaccatgcacattccaatctgctgtcatgcctcaccacgttggagtctctatccactctggtccgctctctccctagaatgattgtcatggatgaaattggaagacaggttgagctttctcttgaagctgcaaatttagctcagggaaatgcaactctaggaataagtgactcttcagcagtatatgcaacaagagccaaggcattggctgaggatgcatttt

SEQ ID NO: 459421 - DNA, 345 bp, Sorghum bicolor
  unsure (1)..(345): unsure at all n locations
cgtccgatggaattggagttgttatatatcaaaagccggcatcgaattcttgctatgctgaaaggaagaccaatgaaccccctctgtgcgtgcgagagagatggatcacgttttccttggtatgctcctcttgatagttgcctttttcacaactaccattaccagtacagatgaaagatacagctggcctgtttcatggcccgaaagacttngatgtagatatgcaagtgtacctgatgattctgcttctaacanagagaagttgaagctgatcaaagtattggaacagctcgttcagaagtatatcagtgactccactaattgtcagcatcgtatgaatgacat

SEQ ID NO: 459422 - DNA, 240 bp, Sorghum bicolor
  unsure (1)..(240): unsure at all n locations
tccgaaatccaggtcgacccacgcgtgcgcgagagaagcttcacagagctttgcttggttggggttggagccctgggggcgtgccagccgagctgtccgtctctctgtctgcagacgatcatccaacagctactactacctcnttacggcaaagcgaaaatctgcggcctcctttcccgagcccgattagatgtaaaaggactacctgactcacaccgtctttagatactgctaccccta

SEQ ID NO: 459423 - DNA, 55 bp, Sorghum bicolor
cgctccagaccagtagtagtagttcgccagagcgtaacaagaactccgcgccgcg

SEQ ID NO: 459424 - DNA, 354 bp, Sorghum bicolor
tcgaattccaggtcgaccacgcgtgccgcttaaggtgatgaagtagaagaggaggagaatgaggcagctgcctctgttcaggccaaaataaaaagtattcatgatgtgttggatgatcctcgctttcttaaaggggaaccagaggatgtacagttgtccaaggagcaagaggagcagaaaaaggatactgttcaatctgtcagggatgctttgatctcaaagaaagttgaatcaagagagcaacatcatgatccactgtctgatgattatccttaagactagaatgaagaggatttttgcaacctgatgcccctctggttgacatcataagcggaccaacttacacttatggcc

SEQ ID NO: 459425 - DNA, 150 bp, Sorghum bicolor
cgtccggcccgccaagttctgcgagctcgcgctttcgttgcccgaccatgcccgtatctacgacgatggcgtctaccgcgccgtcgacatgtacctcaaggcacacccacggctaacggcggaggagcgggacagggtggtgggggtggt

SEQ ID NO: 459426 - DNA, 247 bp, Sorghum bicolor
gtcgccacgcgtcgctcaagctcaagcacgcacagcctcagccacacaccaagatcatggcggcggaactccagcgtgtgactcaagcggcgggaggcccagcgcgcgcgcgctctccagcaacggtgagtggtcgccgaggcgcgccggctgtcgctgcggcgtttgcgtaccgcacacgtcgccaagccggatcatgacagtcctgggagagcaaggccaacaaggagctgaatgacaagaaaga

SEQ ID NO: 459427 - DNA, 406 bp, Sorghum bicolor
cgtccgcggcactcctatccagaggcggcggcggccccctcggctcgcacggtcggccctctggcggcggtagccatcctggcggtgcttgtccccgcacacggcggcccccgaaggctggggagacgacgacgcagccatggcgttggcgccttcttcagacccgcagaggtaggaaaattcatttttactcccggtattatttactcctaccaggtagtcgcacggcgtcgctgctaacggccgttcctccgtcgacgactgtctccacaacccaccgcacgctgcggcccctcactccgacagcggccggaacggcggcgagccccctccccacccctgacacggcagatctagatcattcggacggtgaccttgggctattgatggattacgacgtgtggat

SEQ ID NO: 459428 - DNA, 138 bp, Sorghum bicolor
cctacgcgtgctgtatgcctctttattccctggttgttcttagagaagccaaagatggatgatagtatttcatggaacttcccgccattcacattgttcttaaattgcctgtccactttcatactcaacatgtcggtt

SEQ ID NO: 459429 - DNA, 86 bp, Sorghum bicolor
cgtacgcgcacgcgttcgcgctatgatgtcaatggaaggcttctgactgtaaataaagcagctcctagaggctttcgtgtggacag

SEQ ID NO: 459430 - DNA, 349 bp, Sorghum bicolor
gaaacatcaacattgatatataattctaatagatacccattaatttacacatcattatccatagaacaaagataaacttgtgtaggctcattgcaagttgtaacaagcagcaatgccaccacactaaaccacgcatgagagctccagttcaccataggaaacataaagacattacacattaatacttgctacaccacatctgagttcatacttgatatgattgattatgtagtttccattccattccatcttctactgggaggggataggctgcatctctggtgctggggcaacatcaatcatgtggtacgggaacacccgggcgagccgctcagtgggcacaagcggg

SEQ ID NO: 459431 - DNA, 263 bp, Sorghum bicolor
gttcttcttcgcgaaccgccaccgccacgccacctcaccaccagctcgccggagatcacgagaggggccaggacccgcccgcaatcctcgacgccgcccgcccgaccgccatgggggacgccgcctgcggcctgggacacgtcgtctaccctccccgctccgccgaggacatctataaggactaccgcgcccgccgttccgacattctacgcgccctcacatcacgaaggtcgagggtctttttacgcgtgcagtgctgatcc

SEQ ID NO: 459432 - DNA, 349 bp, Sorghum bicolor
cgtccgtaaattttcagttcagtctgtgtaatgaaggcacatcaaaattgcacgaatgcttttaatgctaggagagctttggagaagcagcctgtgatggaccttaagttatctttgacagtcggaccttctgaatctgttgttactgatgtggaccttaatatggccacccaagataacacagtattgctacaatcatgcaatgtggcttcagttccatctgttgatgaaggatcaacatctgcacgcaggaaatctggtggtaagctacttacttacctggtaccagttggttgcaatgaattccacagtcctattccgctgcatcccgcgatacaactgccaaaaa

SEQ ID NO: 459433 - DNA, 398 bp, Sorghum bicolor
  unsure (1)..(398): unsure at all n locations
cgtccgcataagtgcacacagggcgacgccgaggcgctgtcgctctacgcggcctcgtttgggagaccagccgcgacgctgcccgcgccgacgactactacagccgcgccgtccaggccgcgcccgacgactgctacgtcctgggctcctacgccgggttcctgtgggacgccgaggaggacgacgaagagaatgacaactccgagaccttgccagccgccttgctgttccagggggcggttcagcatccttccatcacagcggcatcttatgtgaacatgaactcgatctagatctcaccaccgcttgtgaacgaaagttggatctggaactctgaagagcaccatgcgagaaagtgagatgggnccccnacgaggcagcgacatcgctggccggct

SEQ ID NO: 459434 - DNA, 422 bp, Sorghum bicolor
  unsure (1)..(422): unsure at all n locations
cgtccgccaagaaatggcacccggacaaatgctcctcctccagcagcgtgaaaccatggaggaagccaaggagaagttccaagagatccagggcgcctattccgtactctctgacgccaataaacggctcctctacgatgttggagtatacgacgatgaggacgacgaggatagcatgcaggggatgggtgacttcattggtgagatggcccagatgatgagccaggtgcggccgacggtaagagctgatggcactactggtcctagttacagatgcttctttgtagtatcatcaaggccacgattagctggagcagacatatttagatttgttgtcacactcacgctgctttagcatggaaattgcatctagcacagacactgttgttttaccacttccttttcacataatcctangtggg

SEQ ID NO: 459435 - DNA, 242 bp, Sorghum bicolor
cgtccgcgagaatctctaaaaggcgccgctgcctggccgctcccgtcacgccgcggcgggcagctagcagcgaagcgtcggcttccagaggccggccgcccggtcgtcgagagccagccagtggtggaggtggagggaggctaggtatatagctaccggagagccggtgggcgcgggcggctctttggccggcacggtctctaccgcaacttggtgtggctgttcctggtcggcgcggtgct

SEQ ID NO: 459436 - DNA, 230 bp, Sorghum bicolor
attcccggtcgaccacgcgtccgctcttcagatagcatggcacactgctgttctgccatgctatctgtaagcatgtataacccaaatggaatttatgctaatgctaagggcgatttctctaagcataatactggctctcaacgtaaacttgccatactatattcgcgtaccggcaacaccagctgacagtctcttgccatcatttgatcctattgacggatatgttaaac

SEQ ID NO: 459437 - DNA, 420 bp, Sorghum bicolor
  unsure (1)..(420): unsure at all n locations
cgtccgcaccaccagaccacaccaccggcggcggcggcgaaccagtcgagaacagaaggcgatggcgacggcgctgaaccgcggcctccgctccgggatccgcctcctcgctgccggcgccgaggcgtccaggccagcttctcgtgggttccatgccactggtgtgaagagaatgggaggacatggccatgtcgagccatactacatccatgccaagcacatgtattacttgcacaggatgaagcatcaagggttgaaggtgactctttccgtgctgggagcggttagcaacggtgtttgagtccctgtgtacgcagtcatattctagcagaagaagactgcctcaggttgagatgtttgcttgctgtgcctgcatgttggagacttattttcaacaacattntgtgaagntaaaagctt

SEQ ID NO: 459438 - DNA, 312 bp, Sorghum bicolor
cgtccgcccacgcgtccggttctcctaattactgccgcagtgttggccaattacgaactcaaaatcttcaaatttatccctcaaatcttgttccaggagcaaaagaagtcatatgtttcctgtgctggcagcgacaggcagaccaaccctttacggagcgcagtatagctatctcaactaaggatggatgggatgtcttgtggccgttatttaacaagttgaggttggtattgtgcgtttaacactgctgtcctccctattatcaacggcgagtgagttatgtaacatactttatggctatgattgattctt

SEQ ID NO: 459439 - DNA, 403 bp, Sorghum bicolor
cgtccgctagttcctagtttgcttctgattttactaactttggtatacccctagtccacctactcgttcagtaagcgcattcgttattaaatttgtcatattgcacagttctttttagtaagcatataagtattatatatattatatattatatattattattatgagcaaaggcaacttactaactaactatactccttttagttcctggtttgctttcgattttacttcctttggtataacccccagttcaagtatttgttattaaattcgtcatattgtacagttccttttagtaatttaattaggtcttattgtgagcaaatttaacttactaactatactcttttttgagctgtaataactggaatagaaagaggatctcatgtgatactgttattta

SEQ ID NO: 459440 - DNA, 414 bp, Sorghum bicolor
cgtccgctgactgggtcagggaggagagtgggaagaagattattttcacaccttcagtaatactggttggctttgctatggtgtaattctagagaatttgcaacagcaggatccttcagcagtggacagaattaaagcttgtgtagtagactcagcacctgttgctgcacctgatcctcaggtttgggctttgggcttctcagctgccctcatgaaaaaacgcagtgtcaccacaaagggactgggttcagatgattcaaggtctgatgtcctagttgtggagtctaacaaggagcccaagctgggagcaacagaggcggttctactgtcagctttggagagtttttttgacgttgttttgaactatccaaagatcaacaggaggttatctgacgtgatgggagctttgtcttc

SEQ ID NO: 459441 - DNA, 289 bp, Sorghum bicolor
  unsure (1)..(289): unsure at all n locations
cgtccgcgaatccagtggctggtgggcgaatccggcggcggcggcggcgggggagcgggcctagccgcgtgcgtggctacattggcgcccagcgtaggggctcaggttgctcgcagctatggccatgcctggccgcggggctccggacatcgcgctcgcggtggtggccacactcggctacggggcttgggacatcgtgctcggcggtggccacacccggccgtggggcttcagttgcgtgcggcgaaggcggtggtctgtgtgtggggcancaatgacgggctcatcc

SEQ ID NO: 459442 - DNA, 397 bp, Sorghum bicolor
cgtccgcccacgcgtccgatcaacatgggcggcaccagtgattgggcagatgatctcctctgcggtacatgcaatgggctcctttgctgtacacacacctacatcaactctcaagatagccaacctagcaactggtgaatgtctgcatctaaagaagcctacaaaaagcttaaaggatgaccacttttcgttctacagatttggatttcacccagtcactaaagaatacaaggttatacatttttgtcaggaaattggtccatttactgaagacagatttaatgtcattcaagtttacacacttggtgatgagaaaaggaaagatatcgtaacttcagaagctctaagttgtgactgggtgaaaaaatccggagtagttatggttgatggtacaatg

SEQ ID NO: 459443 - DNA, 417 bp, Sorghum bicolor
cgtccgcctctctatcagcgccgctgctgctcgccggcgccgcctgccaccagccccggaatccgcggggcgcgggggaccggaaacgctcgctcgctccccctgttttcctcggccgtcggagcgcgtcgtctccgggcagcagcagctgcagcccccctagttcctggtggttcttgcctcctcgtctgggtgtgagtgtggtggaatagcgtcgtcgtcggcgctggaatccgcctgcctgctccgcctccgctcgcgctggagccaaagctactgattggcttctaccgaccagcgaagccaaagagggattcttgggaggcaatcagaggtgtttgttttggtcaaacaaagctcagctcccttctctgtcttgcccatgggatgcttgctgtgaagctgctgtgttcatac

SEQ ID NO: 459444 - DNA, 428 bp, Sorghum bicolor
cgtccgcatattggcaacttgagtcttaattacatgaattgttcatttgaactatccatatccttgggtttaattgtcgggcctttaagagtctgctccattgatagtggtacgcgcatactatatctgctcctggctctaggcaatgaatgtgacttttactgtcataacatgtagcagaataactcataagctataactgaacttaaatagataatatggtgaacaatagcggaaccatgtgtactgatagcactccatttagtaaccctccattgttctatgcctgtgcttgtactaccctccctcacatcattatttatggaggttttcaactgaatacacagcaaggcgtaacaatagcatacctgtctcttgatgatgtggtgcaaatatttgtgtaccactactagctattttattgcata

SEQ ID NO: 459445 - DNA, 347 bp, Sorghum bicolor
cgtccggctatagctagctgaaatggaggctaggagcttactggtggtatcgtcgttgggtgctgtgcctgctggggttgccgcgcagatcccgatcccggcaaggatggacgggttcgtgtacggcgggaagccgccgccggcgtggggcgagacggtggtggtagaggcgttcttggaccccgtgtgccccgacagccgcgacgcgtgggcggcgctgaagaaggtagtcgaccactatagcaaccgtgtgtatgtcgtcgctcaccttttcccgctgccttaccacagatatttgcttcattgcgtgcctgtcagatcatgcggggaacaagctaaatccgtcg

SEQ ID NO: 459446 - DNA, 135 bp, Sorghum bicolor
acgcgtccggcagacagcccacaccacacgcacagcctccgcagctgcaggcgcctgtgctctccgacgagaccccaagaactcgccaacctaggccagccacccttcttcccctctgccgcaatgacaatgctg

SEQ ID NO: 459447 - DNA, 160 bp, Sorghum bicolor
ttcccggtcgaccacgcgtccgagcgagacgcggagccagagccaccgcgttccggagagacacgcggatgcgaaggcagccgccgcgacgatgtggagctcggagctggaccgcgacgagcagcccgtcgacacggcgaccaccaccaccacctcgtcg

SEQ ID NO: 459448 - DNA, 122 bp, Sorghum bicolor
tcgatccgtcgacacgcgtccgcaccgcctgccgtacggatgtcgcagtgaacatcgacaacgggtgcggtcggcgtgcgcgaccgacggaagttctgcggcaaccaataccatgaccatct

SEQ ID NO: 459449 - DNA, 187 bp, Sorghum bicolor
cgtccgcgactagcaactcatcaccatgtcgcttgctaacgccagtgcaccctgcttgtgccgtcggtcgagctcatgctcggcgcgcggcgccggcatgctcctcctgccgcagcacggctccttggaggaggactgtaaggcgtcactctagcactactatgaccttatgtaacccaactgctcc

SEQ ID NO: 459450 - DNA, 133 bp, Sorghum bicolor
  unsure (1)..(133): unsure at all n locations
cgtccggcacgagcaaaccatcaccatggccgatggtactctgagtcacccgttcttgtgccgtcgctcgtgatcatgcttgggggtggggccgacatgctcctcctgccgcagcacanctccttgaaggagg

SEQ ID NO: 459451 - DNA, 335 bp, Sorghum bicolor
gcacacgaatgatcgaagagaacacagacgtacagtggcagaagtcagagcaaaagtagctcttgagcatgagcagaaagagctggaacgatatttggagctggaaaggatacaaaagcagagagaggaagcgttgcgcagaaagaaaatggaggaggaagaagaaagagctaataagctgagattgctggggaaaaaccggggttgagaactgggatcttcatacacaacgtatgcggcttatgtgcctggaaaaccatagactggtatactatttttgccatgacctggattggtgtttctggagcattgatttttctcttgcgaatgggatg

SEQ ID NO: 459452 - DNA, 462 bp, Sorghum bicolor
tcgccacgcgtccggtaaagttgcagagctccgacgtaactttggcagaatactatacctacagatgaacctgagttcttccctaaaagacaatgcaaaattgttacaagtgatggcaagcaagttggctacttaggaattgtccatgctgaggtacttactctgccttgcttttgaatgcagttacaacctgtgctgcttaagtaccagtagtttagctgccctaattaatgaacaaagttagtaccatattatatatttctttgtgttaggtagcaaaatcttatataattatatgcttgaattatgagctactccaatatcatatttgatttatactaagagatggtactgggatgaataataacttaggaacacaaatgatattatctgagaataagaaaaccataacatggatacacgtggggattgtttttgcaaattaatagcactattccttga

SEQ ID NO: 459453 - DNA, 463 bp, Sorghum bicolor
  unsure (1)..(463): unsure at all n locations
ccacgcgtccgcgcgtcatttgctagctgaagtactagttagccttgcccaattcaagtttggagcaattggtctgctcttctatcgataggatcgctaaatcatgccttaaactacatgttgctttctttgctcgctcatgtcgctttctacatctaactaatgctttgatccccttgcaggcaaaagactagccagaacattcttcaattagcaaaggatgcgaaagacaagctccaaaaggctgctgaagcagacaggagcactgatacaagtgcagacaagaggatagctgatatgaagcttgccaaagattttngctgccacaatggaggagttcagggaaacttcagagtcttgcgattcagagggagacagcatataaagncagttgttccnncagaatgctcagtcaaactatactacagatgaaccgaagttctgaaatctggtaatatgcctg

SEQ ID NO: 459454 - DNA, 334 bp, Sorghum bicolor
cgccgcttacgccagaggacatcaatggctttcaccgagccagtagagggtagaaatcttgcaacaccacaagtgtcaagagccagtgaggaggccctacgctttgctagcatggtcagacaaattatgccatttatctcccaagttgaaacacagaatctaaatgccccaccagacagcagcagcacacctgcacaggctgcatctgggagctcagacagagctagggatgtcccagatgattcgagttctcgtcaacataaccgcgaccaaattgatgagcctaattctaaaaggcaaagaactagcgactgattcaaatctacttgtgagc

SEQ ID NO: 459455 - DNA, 446 bp, Sorghum bicolor
  unsure (1)..(446): unsure at all n locations
gtcganacgcgtccggtatgagcagttattttcatgaccagcatgacagaaagctgggttgttatttttttgctatgaattactattatttttgttattccaggtgttgatccagttgcacattatatggagtggttacttatttntgttcattatgtattatggaatntggtactcctagtttacctgcatctgcatgtataatgtccatacctgttcaattttcaagttttatcaaaagaatggacgtttgatgaacaattgaaatgaggaacaactcctacaaacaaacatacctatgaactaatacctggagtcatgatctttagatttcttttcctttcctgtagtagatgtctgacatactttcttttattgacttgcttgtctgggactggggtctagtggtactggtcaaaatatttagcattatactctatacttgg

SEQ ID NO: 459456 - DNA, 182 bp, Sorghum bicolor
  unsure (1)..(182): unsure at all n locations
cacgcgtcgcaaacccccaatccaccctcatccactccgggcggccatggcctgctccttcgncgncgncaccaccgtctcttacgcccccaccccggcctctaggcccctcgccgctgccccgcagtccgtctccgtcgccgctccgggtcgcaccgcgcaggccgtcgctcgcgctcaat

SEQ ID NO: 459457 - DNA, 79 bp, Sorghum bicolor
cctcatgcctgtgctggcccatggaaagacgcaacagctcgatcgcgctatatctatgcaggaacacacgaaaagcaaa

SEQ ID NO: 459458 - DNA, 354 bp, Sorghum bicolor
cgccggcatcgaccgcctcgccccgcacatcggcaagtacgaggcgttggcgtggctgtgcggagggctggggttcttcgctgtccttggcgtggctgctgctgagaacgacaaggcctccaagataccatatactcccaaagtctacccgtacgacaacttgagagctgaacttggtgacagaccattttagattattcatctgtttgatgacaaggcactttgatgaatttagctctatatctccttccatcagagaaaagcagggaaaacttgtttaccaatgttgtttatatattggtgtgatagccttgttgtaaactaccggcgatggatatgccatgaagcatgggt

SEQ ID NO: 459459 - DNA, 344 bp, Sorghum bicolor
tccgcggacgcgtgggcggacgcgtgggcaagactgattatcctctgccgacttctactccaaaacattcgacaattgtcgaagctgaccttccctggagaggattcccacccagcctgtagtatttacacaaggatgtaaaaaaagcgaatatgtaactattacttatttttttttcagattcatttgcatatttctccaaatcttctcttttgctgcgcgttgggtatcaattaggttgtaatcttgttttcccccccccccaccgatattgtgtgagttacaacgactcatttttggcccttgataacgcccacgagtatgtaatacggactaatgaatca

SEQ ID NO: 459460 - DNA, 486 bp, Sorghum bicolor
acgcgtccggctccaggcatgatgaagagctgatgacgaactctgctggttctgatagctcctcttcatgcatgagcgagggagatagggaaagcagctccagcagtacaacctcttcgagcactcaaaatccggaatcgtcttctgagtctgaggaatcacccaagagaataaacagcaaagtaggcacaccatcatcaagagctgcttcacggtctttggttgaagcatgtgcaggaaatggtttcagagaataccagccaaaagccacccgcccagcacacaatgacatgtttgggtacaatgtatcccctgtccaggaccagctgctgcattaccaaggcatgcatgcacctcaacgtccgccaataacaatggggtttcatgaccgtccttgggctgcaccaacgaatggaaacttccagtatgctcgaccatcccacctatattctagtccggtcgtattcggaatacctgggaatcatt

SEQ ID NO: 459461 - DNA, 146 bp, Sorghum bicolor
tccgcaaaagacgaagcagcaacaaagatcacacgagctccgcttactcgacgacccactgcactcgcctccgatcgatcgatccggcgatcacactagtcgagtcgactcgactcgagcgagcgcgcgcccccgatcaatcaatg

SEQ ID NO: 459462 - DNA, 332 bp, Sorghum bicolor
acgcgtccgcgatagcaaattcatacttttttccatgaaacataaccccagctctgatcagtttctattattttattttccttgcatccatggtacctttttgttatggattttttttcttccaaagagtaaccgttgactcataggtaggagagttagtggtggttggctcaaacttagggaggcaaagcagtagcagttaactcagaaaaagaaagcgggttattattttgatcactggtcaactaatgtttatgtggttaggtatgtactgccaattagattctgcagtggtaggtatggttacaaataagctgcagcactatctttta

SEQ ID NO: 459463 - DNA, 52 bp, Sorghum bicolor
ctccgggcggcagtgccggccgagatcgctagggacggggtgctgtgcctgg

SEQ ID NO: 459464 - DNA, 375 bp, Sorghum bicolor
  unsure (1)..(375): unsure at all n locations
cgtccgcgccactctcactctgccgcggcgcgcctgcgcccgccacacacgaggggcctatggacacggtggctccccgtctgagccgctcctcgacgcgatacgggcccatcagcagcagcgctgcctccttcagcgggcccgtccggaagtggcgcaaggcctgggtgcccctcaccggcgccggcaccgccgggtccgggggagggagctcacgaggtgacaataaggtggttctctttaggtggacacctgtgaatggcggctcaggaggaggggcaggggccgacgggggcatggagcccgcttgcagcggggcctncacctncaggcggngctacgtnccggctgcaggggaggcacaaagcactagca

SEQ ID NO: 459465 - DNA, 318 bp, Sorghum bicolor
ctccgccttccccttccccctccacctccgcagcgcccgcggtaacctcaccacgccacgccacatcgcgtgcgagcgagcccccaaccgtcgccggccctcccacccccaattaagccgcccccgcggcgcgatccggtgtgtcctccaccgctgccctgccgccggagggaagggaggtgggggagcacaggcccggggggatgctagaggcgaagccgccgtcgccgggctccggcgcggccggggcggcggcggcgcacattcacagtcaccggcggtgggcggcgccgctgctggcctcggtcctgctctcgt

SEQ ID NO: 459466 - DNA, 137 bp, Sorghum bicolor
cccggtcgacccacgtccgctagcttgctctccctcctctcatcggaagcaggcaggcaggcagccagcaatggccatggcgtcgtcaagcgggctgaagagctgcagcgcccatggcgtgcccaacctcctggcgc

SEQ ID NO: 459467 - DNA, 263 bp, Sorghum bicolor
tccggacggcggtaagaactagtagggctacgtgttgagtgaatcctagtgtctgtatgactgtgatgcgtggttgtgacttgggagccttaggcgtttgccctccatgtggaatacgctcttgagtgaagcatgcctaagctatcaaatgtggtccgttttctgatgaacctatcaaagctatgcaccggtgtgaaatgttcaaatgttcttgtcaaacactgatgtacgatctgctgactaatgtatgtggcctggctttc

SEQ ID NO: 459468 - DNA, 518 bp, Sorghum bicolor
tccggccggtaggcgcgctcgcgcgtgcagggcgacggacggcgcatggtcatcatggccggcatgctccccggcgtggagagcgcgcggaggcggcgggtgcggcagtcgtcggagtcgggggcggcgcggcggccgtccctgtgcctgtacgccggcgggcttggttcgtcgtcgtcggcagcagcagcagcagcttcgtccaaggcaagaactttgctcgccatcacccatcagtctgttcgttcatgtcgtctgcatgtggtgggtggcgtccttgtgatgctttgcggttgcctgcaggtgtggagcggcgcgtgcggggacacgacggcggcgatggcgtgcgcgtggatgacgacgctgggcagcgacgcccgggactccaaggagaggctggatcacaagctcaggggacacagacagcctgtggtgctcaagaggcatcagacgacgagcacgcgaccaccgccggcaaaaccgcaggacgacgcgacgcgcggcgccggcggaagcga

SEQ ID NO: 459469 - DNA, 487 bp, Sorghum bicolor
  unsure (1)..(487): unsure at all n locations
ngtccgcaggtgcccaggccttctcggtctcttcgccggcgacgagcacccaccaggatctacagggaccatggatcaagaacaaaaactagaagtatctgatgccgtgtacacttacaagcatcattgtagcgtaggagttgatgtccacgaggtctttgttaagaggagcagattgcgggttgttctgtcatacattggcattattttccttcttgcaaatgtatgccaaccattgttggcaaaggagagcctatctcttggatcagtttggaatattacctttgccgttcttgttgccaaatgtttgcaatataaacctgtgaagagagaatcagtagtgataatgccagctttttgggttcagctagagatacatttttgggaggatgcataattccgatctgaataaatagacatgctccaatttgtcccttactggctgcctaatctctatcttatatgcacatccacagtcctcgataat

SEQ ID NO: 459470 - DNA, 267 bp, Sorghum bicolor
  unsure (1)..(267): unsure at all n locations
acgcgtccgcggacgcgtgggcaaaaaccaaaaaatgccgccgccctccgccgccgccacttccaccaccgcagccgccagcgccgcgagggacgacatgtccccggcggaggcccggctggcgatgatggagctggcgaacatggtgtcggtcccgatggcgctgatggccgtaatccggctgggcgtccccgccgcaatatgggctggcggcgccaacgcgccgnggncggcggncgagctcctcccggcggaccacccggaccc

SEQ ID NO: 459471 - DNA, 56 bp, Sorghum bicolor
tcgtccgatcgtccacactatctcacatacacggctgatgcctacatctgaagctc

SEQ ID NO: 459472 - DNA, 474 bp, Sorghum bicolor
cgtccgcggacgcgtgggtggactcggagcactggatctcgcgcctggccgccgccaagcgctactacgcggcgcagctcggccacgtcgacgatgtgcccgggatggggacggaggaggtggagatggagatggagatggaggacgacggcgacatggagatggagatggagatggagatggcgctggagctcggggacgcgacgtggccggaggttgcctgcccctactgctacgaggaccatgacgtcgcgtccctcttggtacacctcgaggaggaccacctcctacgagccccacgccgcgccctgccccatttgctcccaaaggattacaagagatatgcttaaccatatcaccatgcaacatggttacttgttcaagaatggtcacaggtctcgcatatttattattcctgagagagatgcgatttctttattgagccgagatctgcggggtactcatttacatgct

SEQ ID NO: 459473 - DNA, 509 bp, Sorghum bicolor
cgtccgcttccagatcccggcctcgaccgctgcacctcggcgacgccgtcgtcctccctcggcggctgcctcctagcgccgtggccgcatctcaggccctgagccggcacatgggtggtcctctctctcctgttccacctctctctctgttcctctcctaacgcgggtggagcggcggcggcctcggcatgcggcgtagcccgacggcgtgcggcccgctggcctcctccaggtgttccctgtgccatccacgaaaccctagcagcctcttcctcgctgccgacggtggccgcggcttagctcagggctctatctagcggtatgtgaccatcctcgtctcctacttcccctcctgacagttgtgcatgttgtgagatccaccacagctcctcagtccttctgctcctgaatcaaggcgacgatggttggctatcctgcgttgccgcggtcggcgagatacagcgggttgacttaatgctgcattaaattgatcagcccttgcatgatgc

SEQ ID NO: 459474 - DNA, 398 bp, Sorghum bicolor
cgtccgcactggtcagacatttaaatgtttaatcaatacatcctgactcgtactaactctagtccacttttgaattatagttccttatgtgtgccaacttggtgttatagaaggggaagggcaagacaagatcttgcaagttttatgtacttttctttattaattctgattagcctcacattcaatgtataggatagcatatgcatattcaagggcgtcacccaagacaaatctttcttccaaaagtgtatttgaagaaccagaagcagcatctgggccatatgctctacctgtagttgaagatactctacaacagccacctaccacggatgatgacgatgttgaaaagttctttctaaccccttcgaaggggggcacatgtgtacatacaaatgggg

SEQ ID NO: 459475 - DNA, 266 bp, Sorghum bicolor
cgtccggtcccttttccggaccttgctaataagctgtgttgcttgtgtttgtgtgagtgagactgagaagaggtggtggggtggggccggtcctgtgcgtcgaggtgttcctgtacttgcttcaatttctctggcgtgtgtaattgtgttgaataagtgggagcgacatgatgcgccctagtcaggctcatgtgtatccgtagttgaatgcttgtactatatttgagtatgacatgtgaatgcagcacgattttattaactcgtcc

SEQ ID NO: 459476 - DNA, 86 bp, Sorghum bicolor
aagacccacgcgaccgacgcgtgcgctccatctatcactcaaaaaactttactttctaacccatatggaccacaacaaagctctta

SEQ ID NO: 459477 - DNA, 485 bp, Sorghum bicolor
cgtccgggagaattttcctcaaaaggctatgggagttttgtctcaaaacgtgtgcacaagttgaacgagcttcagggtgaagataaagagcggtttgcttggatactatcctacatccagcatctcctatctttatttgcacggaatggctccatgtccaaaagccaacggaaatggagaaatgaaaaccagacaaaccgtggaccagcaaccccaccggctgtatatcacaggctgttgctgatgtttaccgaaccagggtccagagtcatgtcaacagagaaaaatgagcttgtgaccaactacatattggtcctaacactttttgccgatgacttcagatctagtcctaacgacatatgtgaggaccttaaaatgacctaccaaaaacttaaaccatattatgaccagttggggtgcaaatctgtgtcattaggtcctttcaagggcagtgctgtgacgctttcagcccctctcaaagttcc

SEQ ID NO: 459478 - DNA, 220 bp, Sorghum bicolor
  unsure (1)..(220): unsure at all n locations
cgtccggaacaatcactggagaaacctngnctgtaccaatcactatagaataacatcctttctcttttgagtgttcgggttcaaggacacaagacatgtaaaaagacaatgggcaccaaccctttggcgggggggccggcccgccgggggaaatggattctccgggcctgggggtggtttgaaaccggaagccggctacccctggaaaggcccacgaatc

SEQ ID NO: 459479 - DNA, 454 bp, Sorghum bicolor
cgtccgcttcctctcctgccgtccaaccagccgccgctcctgccgctcccacccaccgccaccaagtacgctactttcccctgcctaccaccagcagctccatctccaccaccgccggcgccacgcgccgccggcaaggcagcagcagcagcccccgcgccgctgccacgccagagggacaggaggaggaggccgtcaaggccgccgccgccggcgacggagaggtctgcagcgcagaagaagccgctggagcgggcgacgcctctgccgcccgcgccagtggtgacggaggcactggacgacctcgagcaggaggtggccaggaacttcgttgaggacctgctgcacatgctggcgccgccgccaagcagcctgccgctgcccagcttctccctcgtcgtgaaagcctgccctgccaaggacaccagattggtggcgccgggccggccgtcct

SEQ ID NO: 459480 - DNA, 223 bp, Sorghum bicolor
  unsure (1)..(223): unsure at all n locations
cgtccgcccacgcgtncgttatttttttttttttaactttacaaaatagggttggaattaccaactaacgttacaatgaatacaatagaagtgggaatgccatgtacctcatatccacaaattaatacggggtaataggttacattacctctaaccagagacccaacgtgatttagttgacttctacgaaccaaatgccggccttaccgtaggtcacatacat

SEQ ID NO: 459481 - DNA, 212 bp, Sorghum bicolor
  unsure (1)..(212): unsure at all n locations
cgtccgggagaaggtcgtggtcaccggcgcgcttgacggcgaggaatgcggtggaaggcacgccgtgtgggtgtttgatgtcaanagcaagagctgtaccgttttgcgcccgctcccggagttctccntcttcttcttctccgtctccgccgttcggatctgaggatctgttggatctatctcttagtatgtggatcttcttcgtaccgtcc

SEQ ID NO: 459482 - DNA, 144 bp, Sorghum bicolor
cgtccggcagcagccagcagagcaaccaataaaactaaccaacgcgcgggcgcggcggttgcaacctcccgttccgttctgcttccggaagccaagctctgctttagcccgatcggagttcatcccatcaaaatccaatcgatt

SEQ ID NO: 459483 - DNA, 166 bp, Sorghum bicolor
cgtccgcttcctcaggaaaacaaagacagagagaaggactaggcgtggaggccaggggcgcgctcctgccatggcgctctgatggccggcgcggtcggtctagccagggggctcgcgaccttctgcggtgtgtggccagcgtggcccacgaccctggcttgtgtgg

SEQ ID NO: 459484 - DNA, 533 bp, Sorghum bicolor
cgtccgcggctgcttctgccacccctacggccacggcgtccccatcctgctctacatctgccaggccggccatttcctcgatgtcgccgcctgcaacgccacctcgtcctcccaccacggctccccgatctccgtcaccgatgcccgcctcgacgtcctctgcgcgcgcatcgtcaagtactactccctccgccgattcgtcgtcgagaccggccgcgcgcccgaggagtgggaccgcgcacacgacgccgccatgttccattactcgtccgggatgcaggccatcatggtcgcggtgggagtgtgtgacaaagtcagcgtgttcggcttcggcaagtcttccgacgccaagcaccattaccacagcaaccaaaaggcggagctagacctccacgactacgaagcggagtacgctttctaccacgacctctccgagcatccgcaggtagtcccgttcctcaaggattccgggctcaccgtcccgcccgtcgtcttctaccattagggcagcttcgtagagcgcgcgccatgtg

SEQ ID NO: 459485 - DNA, 102 bp, Sorghum bicolor
cgtccgaaaaaaaaaaaaaaaaaaaaaaaaaaaaaaaaaaaaaaaaaaaaaaaaaaaaaaaaaaaaaaaaaaaaaaaaaaaaaaaaaaaaaagaaaaagggg

SEQ ID NO: 459486 - DNA, 249 bp, Sorghum bicolor
cgtccgcggacgcgtgggcgcgggcgccaccgccaccgccaccctactcctcctcctactcccggctctcgccctccgtggggcccgggggaccccgccgagcgcatccgccgccatggcctccgacacgaggctctccttaccgtgccgcctgccctcgctcctacctccgccggtgctgctgcgccgaatgacccgcgcccccgacagcaaagcaccatcaacactctcataaagattgtacagggc

SEQ ID NO: 459487 - DNA, 467 bp, Sorghum bicolor
cgtccgctgaatgtagcacaaggtcaggccactttgacgatgaaaggggtggaagatgatgaagacgatctgaagacactaaacatggagcttaagcgggactggtctagagggaccaatgcattcgagttggctttccgtaggaacaaggagatctctgcattcttggatcagaggcaaaagacaaaagtgccggaagtacaagcagctgctgaggaaagtagtgaagaattgagctccttgtcagaagtagcaactgatgttcctgctcctgtatctgatgccgcttctcaggtggtaatcgaggattctacttctgtggcaactgctgctgagggccaaactgtagaatctgaaagctcacctgtaattagtgttgaactgtcctccaacgggatcccagatagcactagtgtgtctccagtttcagaaactgcggagaaacctgctgaacctggagaatcttc

SEQ ID NO: 459488 - DNA, 227 bp, Sorghum bicolor
cgtccgcaccaattcgattccccatcgagagcctgtttgcctgccgctgatcgccatggccgccgccgccgcgctgaggtccccgtcgctccgtcagggtcgtctcgggcccttcctccgccgcaggggcggggctcgccaaggcgcgtcgtcagcaggcgcccagggtcgccatccgcggcgccgccggggccgggcagcagccgcggagtcttcgtggcgccgac

SEQ ID NO: 459489 - DNA, 443 bp, Sorghum bicolor
cgtccgcttgtctataaatgaatagatgagatagtctcatggtgacctcacctacgttacttataccaaaattgataatggttaaatagataactagatcattgatctttgttcttttgaaatgccaagttaggttacactccctattgtcgattttcttcgattacgtgtttgttgagggagacactcaaattgctccttgtataatgcattcctgctccttttaggactattctcgtaatcatattattattctgtctttatgctgaacatatagtgggagattctatgtaaaggtgtgaggccattggtctttgctacataaatttgcacaggcatcagaaaaaaaagttgtttctttagaatacaacgatttaaggtctgttcacctctcagaattaacctatttgaaatcattacaatagattttgattattcaaaat

SEQ ID NO: 459490 - DNA, 287 bp, Sorghum bicolor
  unsure (1)..(287): unsure at all n locations
cgtccgctcgcccccccctctgaaacaccggtggatccatcaacaactcctggttccgcggggacacggccggcccggcggaccccggcccaaaagcgtacgcgcgcgccttttatatccgcgcgccggccaatcgatcggccacagcaccaccgcgccgcaccacaccttagaccacacgcagacgcagcagcttcttgttgccttatgctatactaggtgctgctacgtgctagcgaggcattgaggccgacnatggaagcggaaggggcggcggcggcggcgga

SEQ ID NO: 459491 - DNA, 406 bp, Sorghum bicolor
cgtccggatgaacctaaactttgtcgctcagggtggcactgacatgatgcatcttttgagtgaggcaatggctttgctgtcaagttctcatgatgtccttccacaaatctattttgttactgatgggtcagttgatgatgaaaggaatatctgccatactttgaaaactcagcttattaaaagtggatcgaagtctcctcgaatttctacttttgggctaggttcatattgcaaccactatttcttgaggatgttggcatcaattggtaagggtcactatgctgctgcacttgatacaggatcaattgagggtcgaatgcttcaatggttccagaaagcctcgagcactatagtgtcaaatgtttccattgatggcataaaacatattcaaggttttgaagtggat

SEQ ID NO: 459492 - DNA, 235 bp, Sorghum bicolor
cgtccgacaccaccaggtgagatatccagcaactgcagcaagagcatacaaagcgagatagatactaccacaagagtctgttaagggcggctgacaggagcaggatcactccaagggctcgatagaggattgagaagcaagcctatacaagaactatagagatgtgatggggctaagcagaaacacacgcagggtgagcactcgatactgcagaacccgttcatgatcaagcgca

SEQ ID NO: 459493 - DNA, 385 bp, Sorghum bicolor
cgtccgaccagatacatggatccattcgtgtgccacataccgcagctactagctagccgacagcacttctcttctccgagcgaccacgaccggccggacggccacctatactagttcacccaccctacgtacgtgcacgctcctatggcgaccacggggatggccaccacggaccgggagctccctcgccttattaggacccggcgcgcgcgccagcgccggcagcttgcccagtaccactaccacccatcttaccgcggcggacggacgtgtcaacgtgccgagccagcgcgcgctgctcgtcagggccggccagcagaccgaggacgggaagcccgcggatgctgctactgcttcgaaggcgctagggctctgggacgcgctg

SEQ ID NO: 459494 - DNA, 216 bp, Sorghum bicolor
cgtccgggcggaagctccaagccatacgccgtcgtgtacgtcagggcgggctaccagcggctgctctaggagcccgacccgcagctcgtcgacatcatgccgttcaaggatgcacgggaggacggtacgcctgatctcaatgaggccaagaataatgatgctgccgtgccgtacaacgatgaggacaagaacggagtcttgaataatctgacactg

SEQ ID NO: 459495 - DNA, 74 bp, Sorghum bicolor
cgtccgctcaacacaacggcacctactgcatctcctccaacgcgccgttggagttggagtcgcactctcttttc

SEQ ID NO: 459496 - DNA, 372 bp, Sorghum bicolor
  unsure (1)..(372): unsure at all n locations
cgtccggttgaatggatgccacccaagggtggaataacagaaggacaaatgcttaaattcatgggcgcaaacatacacttatctccaacacaagccaagatactgttggaggatgagactactggttttgcatatttgaatcttcaagaagcttgtcccccattatattcgattattgggctcagggagcatattaagaaacggccaccattggctacctctgagaaagttcaacaatttgtgagggcacggnggagagaatcaatgattgcaggattttatcatgaacgctatgaagatcccttgcttatgccgatgagaagaagaactgtncatgctggactagttgtaaagggtgaagaaggtgcgctt

SEQ ID NO: 459497 - DNA, 97 bp, Sorghum bicolor
cgtccggccaagcgtcatggcgaccaccatgctgtccgcgatgctatccgagctggcttcgcaggtccgtctgcgcggccgggtcggtctctgctct

SEQ ID NO: 459498 - DNA, 214 bp, Sorghum bicolor
accgcgtccacctccccggacgcgggcgcggaggcggctgcgcacacactgtagtgagtcaggaagagactgttgatcattacagaaggcacgagcaaaactctataatgctttaccaactggagagaagtttatgcatctaataaaagaacacaacatgataaaactcacctaatcactttctgcatgagattcatatgcatcattattaaca

SEQ ID NO: 459499 - DNA, 70 bp, Sorghum bicolor
gaatcccggtcgaccacgcgtccgatccagcaacatacagatcagagagagccggacagttaacttactc

SEQ ID NO: 459500 - DNA, 240 bp, Sorghum bicolor
cgtccgtactagtcctttcctagctagctcaacagaaacagcagtgcaaagacaggttacaacaacctaccctaacaggccattcgttcgttccagtgcactgtattcgtgagctagctacctctgagctccaactccaagtgtacctagtgtggctacctagctactggctagacacttgagaagcttgcagtgtcgccggccggtgatgtgtgccgatgtggacgagtgcggtggatg

SEQ ID NO: 459501 - DNA, 83 bp, Sorghum bicolor
cgtccgagaaaaatctcagctcattcaccacgcgcgctaaaccaacgacatggacacctatcgcaccttctcgcacagattct

SEQ ID NO: 459502 - DNA, 226 bp, Sorghum bicolor
aatcactttgtctactaccagtctgtttgtgagtactgaaatattttcatacaaaaatctacgtgctactataagaatgcataacttatgccaatatttgtcatctatgatctggaactgcgatttgatagctaggagctttcaaatcattgcggcaacttaggcagaggaactgtttattggaatggcacctggagttgtcaaatcaaagaagacatatggacct

SEQ ID NO: 459503 - DNA, 489 bp, Sorghum bicolor
  unsure (1)..(489): unsure at all n locations
cgtccgatgaaggtcggttcggaccgacatgcccagctcgagcaagaggttgttgagagagtggatgtcgccattagatctgcggaagaactatgggcagtaaaattcatcaacttcatcgtgggaacaaaccagctaatgttcgagggcatgacacgggaaattccagtgattgggtttgtcgaaggttcatggatgataggaattatagatgaaatcaaaatgcccacggttggcgtttcattgcaacccatgctggtggatacaaagacacgttccacgcgaacaattccatcagaagcacaaaaaagaaatggaaggcttcaactgatgtgttacaagtatctatgggacaatttgaccacacagaaattcccagcagagaatttcttcagctatnttgacctggaccccaactacttgttatcagatgatgtcaaggggtatattaactcattgggattcaatgcaaagacctttgaagatgta

SEQ ID NO: 459504 - DNA, 191 bp, Sorghum bicolor
acgcgtccggaggaaccttgaggagaagaaatcagtccgtgatgagttaaagaacttagagaagatagcaatgcagaaagtccaagagaagaccaatactcttgagatgtatactaaggtttctgaaaaactagcgaagcatctatttaatatatctgctgcacatgaacagagcgcagctgcttaagctt

SEQ ID NO: 459505 - DNA, 467 bp, Sorghum bicolor
cgtccgagaattggtacccacaacccaccagcatgccccccgatgtgtagatgcagggcaatggtggatcatcaagaaactgcgtctccaccatccccgcggcgtcctcgcagctggatctcccatccatcttcggtacattcctatccctgctcccatcaaatctacaacaacaagtacaacaacaagcacaagcaagtgggcttggagctgtgattctggacttggcacgactggatcccaactcccagatggatgccttacgtcactggatggcggtcaagccccaggcggcctcgcccgggccttggcggtctgcccccaggcggcggtctgcccctaggcgctctggcccggccaggcggagagcgctaacttcgttgcaggtagatcacttcctccccttcgcatcgtggacggagaaagggtctgtggagtagggggcgcccgacccccaactgttggtg

SEQ ID NO: 459506 - DNA, 125 bp, Sorghum bicolor
acgcgtccgcggacgcgtgggtatggttagtgtggctaaatattttgatgctccgataaagcttctgattccaactgcaacaccttggtgacattgcaatacccgtgctgtgcactggccaggaa

SEQ ID NO: 459507 - DNA, 170 bp, Sorghum bicolor
atatgcctgcaaccacattcctcgccacgctgcctctcgcgcgccacggccgcgctgtttattgcgactaatcccgcagcgctcgaccggctggagagcatcatacctcggtacggctagatcatcgacagcatcttcttttcctacagggaccgggacgggaagctgca

SEQ ID NO: 459508 - DNA, 225 bp, Sorghum bicolor
ccgtccgttatcccggtcgacccacgcgtccgcccacgcgtccggtcaggtggaggtggtgcttttctccattcagattaacacgccatcatcggctttgtttctgatcccaaatcatttacggcgcaagtgccttctgttccaaaccccattcccacagcaatggcgtgcgagaacggccgcgttgctgctaccaacggcgacggtctgtgcatggcgacgccc

SEQ ID NO: 459509 - DNA, 205 bp, Sorghum bicolor
cgtccgcggtgaaccgctccaccaacgcgcgcgcagaggcacgtaccaccactaccgcagcaggcagtagcaccagcgcgggagcagggaccaccaccacccggctgtagcagaggtaggcgagcatggtcgttcttctgagctcgctttagttttatgttgtggctgtttaggttctcgcttttgtttgcttttttttattttt

SEQ ID NO: 459510 - DNA, 64 bp, Sorghum bicolor
cgtccgaaccgggccagtgggacgtgtgacttctccggcgctgcttccgtggtctaccagcaac

SEQ ID NO: 459511 - DNA, 503 bp, Sorghum bicolor
  unsure (1)..(503): unsure at all n locations
tacgtcgaattccagntcgacccacgcgtccgcgcctctcctatcgtctccccagtctccacgccgcgagcgcagggtgacggaaagcgacgccgcgcgagcccgagcgagggaggagggtcaaggggggaagaggccaacgtctattacaagaatccttatctgtttgagcttcttaaggcttgttagtttcccaagtacattgtgtttttttgttaatatttatttgtttttttcatttcttttcattttcttgcatattcgctgagatttttattttgcgttaaatttgttttaattgtgttatattttttaatgttttatgtttactatctttagttttgattccctatatttttttatttttaatttatttttttcaatttatttttatttgttttatttttttaattttcatttgatttcttttgttttctttttaatcgttttattttttttttttttttttattttattttatttcgtttatttttttttttttt

SEQ ID NO: 459512 - DNA, 398 bp, Sorghum bicolor
cgtccgacggtatcttctaaaggcaaagaattctgggtctcaaaagtgggcagatatgtgcaagcttgaagcaatgccatcacagagtttcatcttcctgcaattatatgaactgaaggatgactttattcaagcagaaattcggaaaccttgttatcaatcagtttgttcacattctacaggttggttttcgaagccaatgatcaaaaccctgacggtgcaagtgagcataaggctcctctctttattgcataatgaagaagctaaaaacttgtcgaggaatgcccatgaacttattgaaaggtccaagaagcaggaagccctttcgagatctgagtggtcaaaagaagataatgatgctggtgaagttcctgccacacaaactggaactgaggatc

SEQ ID NO: 459513 - DNA, 364 bp, Sorghum bicolor
  unsure (1)..(364): unsure at all n locations
tcccggtcgaccacgcgtccggagcagtccggtacaggactaccagatgtgcaagatctcagggtgcagagctagcaactgcagatgccgtgtggacgaagacactccagctctatgagagctgctctaagatcccagcgacccgtacttcgacagcccttagtctgtggcatgtggctagcctaggagtactaattcttggcacgtgtgaactagcagtcgacgctagaacagagaagctgcttcccatgacctaggactatactgatgcacatgagtcanccgctggtacgatgatccgcgcgaggcaaaccatagctaaactcatggccagtcaggacagattacacgatgctgtcgagct

SEQ ID NO: 459514 - DNA, 179 bp, Sorghum bicolor
cgtccgcactccttgagattagagaaccacacgggccaccctccacccaccctccaaggacatggcggacgccgtccaccgcttgagagaccgtgttcaacaagttgaagaccgacgtctatgacaagaagccggagctagaagagcctctcaaggctcgccagtcccccaagtacatg

SEQ ID NO: 459515 - DNA, 208 bp, Sorghum bicolor
tccggattcccggtcgaccacgcgtccgctcgtattctagctcagagagttcactggcaaggccggcgacaccatttatttctagaacaactgcgggaacaccgcacagcgtcacattatacgaggactaggcgcaccatgtattggactctcaactatgatcatacgcgaggaccacattatttcaccgagcgagacctaatacagg

SEQ ID NO: 459516 - DNA, 242 bp, Sorghum bicolor
  unsure (1)..(242): unsure at all n locations
attcccggtcgaccacgcgtccgggtccctacatacaagcgctccgtcaagtccaagaagtgatccttgcttccaccacggtaaagaaagaaacagaagagagtgcccggcacaggaatgtggtcagccggagcatggccccgccacccaaggcgatcctgaagaggaagaangcgcattcctactggtcatgggctggcccagctgtcatagtggctgcggtgctggtttccctccttgcg

SEQ ID NO: 459517 - DNA, 311 bp, Sorghum bicolor
  unsure (1)..(311): unsure at all n locations
gaacaatgatacctgtattgtctgatcatagtggttcgacatgctcaactagcaggaagtattagagtagcattgagaaatgagaatacaccaacttcattcactcaaagccaaacaattcattacatagtattataataagagtccatctatctttagggtccatccatccctcattttgtcatgctttggagctcctcaagcttcagcggtacttgatgaagccgatgtcctttggcgtgctgcggaagcactgcctgcagcacatgagcccgtacttncngatcaggccgtgggggttagcgcacaca

SEQ ID NO: 459518 - DNA, 190 bp, Sorghum bicolor
ccttattgatgcgcgatgggacgatgatggcagagatggagcttcggatgatggaccgttttctcgacggggaccgcgccatgaccgcggacgagctcacgggaaggacgccatgtcctgctgctgctactgcagacgctatggtcgaccgcatgctgccgcttctagctttgtacggcgtggtcaggtg

SEQ ID NO: 459519 - DNA, 156 bp, Sorghum bicolor
tccgaaatcccggtcgacccacgcgtccgccccttcaaccccaacactccggcggtgtcgagcggcggcgatgacgacgagcctgaagaagaaccggaagaagcgcgggcacgtgtcggcggcgcacggtcgcatcggcatgcaccggaagcaccc

SEQ ID NO: 459520 - DNA, 164 bp, Sorghum bicolor
cgtccggtacgattctttatttgattttcaacttgcaatacgcaagaaccacattatttctgtgttgactgtaagaaacataatgtattaacattatgtaatgtatgtacgattctttatttgattttcaacttgcaatacgcaagaaccacattatttcagtg

SEQ ID NO: 459521 - DNA, 221 bp, Sorghum bicolor
tcgccacgcgtcggtgcacaacggcgaggaactgttcatatgctatacttgtctgtaacacaatcacacagctggctctctggtcgttgaaaggaaatcctatactgttaaagtcaccagcaataaattggcattgagactcctttgaatagacagagacctgtggtggatgcaattgtgacagtgccactgagccaacacagatctgagaaaagagttca

SEQ ID NO: 459522 - DNA, 288 bp, Sorghum bicolor
cgtccgccttctttatgtgagggagtttccgaagatcctgtcagcatgagctttgacatgctttcagctggaggtcactctgtctgtgtgtcgtcttgtcaatgtaaacatgttgatacagtactgagcaaaacaaaaagatgagtggagtcatcaaacatttcccccattacagaagcaagtgtgatgaaaagggcgctggtagacatgttccttgggggcaagaagctcagttgaacctttctggaacagctccacgcatgaacatcacgacgcaacatggtcagt

SEQ ID NO: 459523 - DNA, 121 bp, Sorghum bicolor
cgtgcgcactgtcaccacaccaggctggtgagtaatctcccgtcacgccatggaagccctcggcacgacgccccgaccgctcttcgcgcgcgcgttcccggcggcattattgttggtcgcg

SEQ ID NO: 459524 - DNA, 103 bp, Sorghum bicolor
cgtccggcagatcgagaagcacccaaccacactgcaggtggtggtgagtcctgattgctgctggcaatggcgattgaagcgatgatgctgtgccggctcaact

SEQ ID NO: 459525 - DNA, 172 bp, Sorghum bicolor
cgtccgggagaaacaccatttgacagagcatacggccagccattttttgaataccttggtgaaaacgggacagtgaacacgttgttcgatgaggcaatggcgaaccattcgacaatcataacgaaaaggctggtcgaggtcttccgggctttgagaaatacagggtgctcgt

SEQ ID NO: 459526 - DNA, 246 bp, Sorghum bicolor
  unsure (1)..(246): unsure at all n locations
cgtncgtgcacgcgtacgcgcttccggacgttcgtgctcgtgcccaaagcatctgctggtgggttttactcctccccctcgtctcggacggtcgtgtgcgtgtttccgtccacgcatatgtagtgcgctccgcaccgacccccactgttcggggggcgatcaccgaccgaccccattcaccttttttcctcgttcgcatggcgatgctgcttcgtaaggtgtggggctccttgctcgcgcgcgctc

SEQ ID NO: 459527 - DNA, 100 bp, Sorghum bicolor
cgtccgcggacgcgtgggcggacgcgtgggtcgcgtgggcatacggcgtggtctgaccatcgacccggcggcggaggaggagcccgcagcggcgcgcgtg

SEQ ID NO: 459528 - DNA, 344 bp, Sorghum bicolor
taccgtcccgattcccggtcgccacgcgtcgagcataccagcagctgctacaccacatcgatctgctcggggggctgcaagccaggaacaacaaagagctgctgagtctcagagctaactctcagctctcgaggatgtctctggaaggctgtggacacctggcttggactcgggggcggacccgtcagatcttcggcacggggaggcgcagcccgtgttgccagagcacgcggcgaagaagcacgtcatcggagccgggcaccgggagcctaccgtcgcgctggcgacacctatcagcatgagggttcgcgctgatgaaacccgctaggcgttcccttactacc

SEQ ID NO: 459529 - DNA, 424 bp, Sorghum bicolor
  unsure (1)..(424): unsure at all n locations
cccggtcgaccacgcgtccgaacaaacagaaacnttttacagctgcggactacaacggctgtggccattccttttcttgtaaacacctctgttctggtctcgatgcgcggtcatgctgccttttttgttattctaaccggatgcactcagtaacgctagagttaccatttgaggtcactctcatgcgtcacacagccatggcttcgggcagcacagtaaatcagaaggtgcgactccgcccatatctggtcgtagcggtgctcctgctgcttgcagctgatgatccaagcgcgccgtgagcatagttcatgcgttgtggagtaacaaccaggggcacagactaagaaacgcatttccacatcacgggagagtgctgctttttttttacaaatttcctgattggttttttacctcacaaagggta

SEQ ID NO: 459530 - DNA, 399 bp, Sorghum bicolor
cgtccgaccatgaattgcaacgaagtgagcatcaattagaaaacaggacctgtaaacttgaaaagctttcgctcagctcagactaccaagagttcctccaggcaaaaccaccagctacaccgtcaactgcaacctataagtagatcagcgtctcttcttgcttgcttttgagccgctctttgatgggctcgcgacgaggtagataaacagtccaacaaacgagacaacagacacaagtgacccgtatttcgccacaagcctcttagcccattcaaacttcttctctggaggtctctcagcaagaatatccagtgggaagatgggagttgagtaggcctcctgaagagctgtctttgtgggaacacggtatgtaataatagctggtgaaccctggaacct

SEQ ID NO: 459531 - DNA, 343 bp, Sorghum bicolor
cgtccgccgccttccccgtccgcggctccacgtccagcagcagcatcgtcgccagcctcggcagcagccgcgcccctcgccccgcgccgttctacgtccggcggcgccccagcctcatcaagaacgcccccgtcgtcgccgtccccgccaccctcgtgttagcgggaggacgagcagctcatcaaaagtcaaacgagagagaaagggagagagggccacaccacatccattgatacgggaggagagacgaaagaaaacacaaggagatgagcagttgcctttgcctccctaaaaagaaggagggccagggggcggcagcgaagccgtccatagattcaaccac

SEQ ID NO: 459532 - DNA, 354 bp, Sorghum bicolor
  unsure (1)..(354): unsure at all n locations
cgtccgtgggaactatggtggccacagtttcctatcttggtttacttcaaggagacccagacaaagcccgaaggacaaatccacttcttccctgtgatattcaatggtcgacaattatatgatgtaatggtggagcgtgctggaccctcgaagacgagtggccctaaatagtgccaccttgcttcttccctcgtggcaatgacatgactntccatgtcttctatggctcgaatccctggacaaatattccttcctgatgtggagcgtgcgcttcccttcaagtagaaggtcgtatatatatagcgtctatacttgcatcttcagtagggataatagaaactaatgtcatgcaac

SEQ ID NO: 459533 - DNA, 354 bp, Sorghum bicolor
  unsure (1)..(354): unsure at all n locations
tcgaccacgcgtccggctgcatcatccttggtcgagcagatagcatcacttgcagcaactatgctttgtcatgctggtggngtgatattgatttgtctcctctacgagcagattatgcccactctgctgctttcaggtggaaaagctaagcttggttccgctggtcaggtatgcagcataatcgaaggattcacattagctcatgttctcctcgtttcgggtgcaagcatctggggagtcggagaaacgtccgcagcttacacttcaatatacacatccaaaaggcaacgggttgtcgatagacacttggagttcatgaccaaggtaatggagggtaacattgtgctgggctgg

SEQ ID NO: 459534 - DNA, 317 bp, Sorghum bicolor
cgtccgggagtggagagcagagatgagagagagattgagcatgtaacaggctcgcttctcccatctctgtctctctctctctatctcctctactcaagagtcacacaagcaagagaccgagcgagaggatgatgtggtcgcatgagccggcggcggagcagaaggcggcggcggcggcggcgacacggcagcggagctccgtggccaagctgacgacggcctcgtcctcgtccttggcgaacctcctctcggtcttcgtcggggcgaataacagcaactcctcgtcgggctgggcatcgtcgcggccatgagccacg

SEQ ID NO: 459535 - DNA, 74 bp, Sorghum bicolor
cgtccggtcaagcacgcgttcccgacgagagcatgaaacccttgcccacctagacccaaattactaaagagcca

SEQ ID NO: 459536 - DNA, 274 bp, Sorghum bicolor
  unsure (1)..(274): unsure at all n locations
cctggtggacgctgctactcccgtggtggctatgtctcaagatggtctgccctttggtggggatcagccgattcagcccccgccccctcctgggctggaaactccctcgtctacaggcgtggtagtctcgtcggtgaccccgcaagcggctgggcccacntgtgtggttgtnccatcgtcaactnncgtcatggctgggacaacccacgagtttgccgtagcggagcagattaccctgcaagcaccgtggctggccccatgcttgctgcacatc

SEQ ID NO: 459537 - DNA, 285 bp, Sorghum bicolor
cgtccgcggacgcgtgagctgatgaaaaagagaaactgagcatgtgacaagctggattctgacatgtatgactatatgtctctatatcatgtactcaagagtcacacaagcaagagaccgagcgagaggatgatgtagtcgcatgagccggcggcggaacagaaagcggcggcggcggcggcgacacggcagcggagctccgtggccaagctgacgacggcctcgtcctcgtccttggcgaacctgctctcggtcttcgtcggggcgaataacagcaactcctcg

SEQ ID NO: 459538 - DNA, 285 bp, Sorghum bicolor
cgtccgattccttctcggctcagttgtaatgatcatggaggacgctgatgcaccacaccacctactgcttcttcggtgcttcatgtctcagggtgttgtgcacaaacagcccctgctcttttcaggagctatgataggagccgcggtgttccttggtacactacctgctccaggttcatcttcaaaggaggatggacgacacagagcaatgggggctgcggcaagtagtgatggacgagcaaaatattagggtttgaggatagcttggcagtacaagaaatactt

SEQ ID NO: 459539 - DNA, 78 bp, Sorghum bicolor
cgtccgcaagaaggagagggactacctagaaaaaccgccaggtggccacatatacgataatacagattgatgacgcgt

SEQ ID NO: 459540 - DNA, 127 bp, Sorghum bicolor
cgtccggcacgctccacgcgaccaccatgctgtgcactccgccccaaccgctgcaacactcctcgcggtcgcggcgcccgctccgggccgcgccggcgccacgatgctccaacgacgcccagcctcg

SEQ ID NO: 459541 - DNA, 233 bp, Sorghum bicolor
cgtccgaaagaaaaagtttatagagacctcttgacaatcccaacaaccgcatgttgtccctttttgtaccagcgtgtaatttgcctccctaccttgtaccctatggtcttctgtctgtgtagacgtcggtgtacatatctattttggtgcggtacaaggtagggaggctagttactccatttatcgaggtgtactccaaaggttgtatatatcagtaattcagtgtcaccatc

SEQ ID NO: 459542 - DNA, 162 bp, Sorghum bicolor
cggtcgacccacgcgtccgttatctctctatctcttacgctgcttgctcccttcctcctacagccccctttattcctccatccgctcgcgccaagggcttcagggtgcggacagggatcagtgcccgacggccgcacgacatgatctcctggcggcgcatca

SEQ ID NO: 459543 - DNA, 189 bp, Sorghum bicolor
ccggtcgaccacgcgtccgttttgagttccgacctaggttgtttgttggtggaaaataaagaaccatgtgctactgcaattatcaatgtacaaggaacggccggacgaatgggacagtccaagcttaccgtcgcgaacgtgcaaccacatagcatttatatggtgccaccttaattgaatacactggcc

SEQ ID NO: 459544 - DNA, 347 bp, Sorghum bicolor
  unsure (1)..(347): unsure at all n locations
cgtccgaaatatggtttgctttcggtaacatccatgatacacggcttgtttgccccgagccgacgttgctgatcatatgtcgtcttgtgtatcctcatttagtactagctttccagtggtgattttgggatagccctggtgctttagtaaatgagatttatttgttattgtaaccgacttgcctgaaagggtccataaatcctcttcagtcttcacgtaggcacgcagtgttatctggagaantttcaaaattcacggcgaatcagtagtggtccctttcaacattgctttgattaaacaagccagctgtgctgctgatntaaaacaattcttttctcaatattctc

SEQ ID NO: 459545 - DNA, 188 bp, Sorghum bicolor
gccccggcggcgtcaacgacaggcaccgcttaccctgggagcgtgtcaccacgctctgaagtgatcacctgaactgatgtcatatgacagcgcgttcgctgtagatcactttgtatgctatgcctgactaatcgcttcacatcgaacagatgactaacgcatgtttcaatatggatcaatcagtgtat

SEQ ID NO: 459546 - DNA, 249 bp, Sorghum bicolor
cgtccgttcactgatcttgaacaatactcacgttgaaatatagcccaagatatcgtgtatgtactaagcggactctaaattttactggttctgaattattatttcaggtccggtaccacgcgaggaaaacccaagttcttgctactcagtgatgaattgctttatggtacatatgcttcacatgttgccaacttcacacgcttatagaaatcgggcgtgatatactgagaaagacactacttacattca

SEQ ID NO: 459547 - DNA, 56 bp, Sorghum bicolor
gggtcgaccacgcgtgcgatcccatggacgacctcaccgggggggcctcgagctct

SEQ ID NO: 459548 - DNA, 189 bp, Sorghum bicolor
  unsure (1)..(189): unsure at all n locations
cgtccgcaaacgcacgcacccnctcaggcctcagctcggcaccacacacacagaacgcgcgtgtgctcctgccttcccgatcgagcaacgagctaccttctacctagcttgaggacacgacacgatggccttgcaggtcaccggcggagtgggctgctgctgccctcgtcctctcccggcagtggcggc

SEQ ID NO: 459549 - DNA, 357 bp, Sorghum bicolor
cgtccgaaaagatgccgctatttgttatagcccacattttaaaccttgaggttaaacacaactatttttcaacagtcaacactccttttgtttactgaatgtgccatcacagcatagattcatggattcagcattgcctatgtattttgatgaatttcaaattccttctcctttgtgagtagttttatatccaatttcaaatactttttccttaacaacagtggtttattactcaaggaacagcttaccgtgttagcctatccacaaattactttgcttctgggtcctaagctttggttcttttattgcgccacaagagttgcatctgaacaaaaatgcaagtatttttaatctttg

SEQ ID NO: 459550 - DNA, 192 bp, Sorghum bicolor
cgtccgcggacgcgtgggccggcgcacatcgaaaagcaagagctcggcaagcggaagcgggcactgagggctggtccaactcaccaccaaggcagccgcaaccttcccaatatcaagcgagcacttgaggccgcacagtcagacgtgccggtgtcggagtttgtagcatgggctgtgtcccacatgggctca

SEQ ID NO: 459551 - DNA, 345 bp, Sorghum bicolor
cgtccgattatgtgttggatgcgagaatgtcgtggcatttcctttctttgtggacattgttgttagtttcagtggaccgtggaacctatgaatagtaggcattgctagcaagcttttggtagaatgtgccaaagtttggtctttttaccaggaatgaaattagactactgctctatgtatttcttctgtctttttcctgcaaatgtcatttaattagaaatagtaaaatattctgctaagagtggcaaagagacagactgatcacttctgctgaatcggtctaacaaagagtagtattctgtttactctgttctggatggatactttaggtttatacattggact

SEQ ID NO: 459552 - DNA, 90 bp, Sorghum bicolor
tccgcattcccggtcgaccacgcgtccgagcggttatcgatggaaaaggtagcagctatagatagagttcaaaggcacgtagactgactg

SEQ ID NO: 459553 - DNA, 444 bp, Sorghum bicolor
cgtccggtccttgatgcctgtcgcaggagcgagcgactgaagggcacacgactatccatgtactcactgcactatgggcagactacaacgaccaggttcatgcagtgactttctagatggaggagagcgctactcgtacgatcacaccttttcaccagtagctgaacaactacatgaagcagcaatctgtgaaccagatctctgatgcttccagaacacaaggctaaccccatgaggatgtgactacacctaccctctaggtggttaagattgccgagacaatcaaagcacacttgcacaagtccaggggcagcaacggactgagttattcattcaacataatacataacgaggttccatgaggccgccaagcttgcgaggggaccgctcctgacacagagctccaacgagaagatctggttatctagcccccaggaacctatg

SEQ ID NO: 459554 - DNA, 568 bp, Sorghum bicolor
cgtccggccggcggtcaacggtggcgataaggaggaatctgccggcgatgcgagcccgaacgcagacggtgaccaaagtgccgagcacaacctgccggacagcccgtttgcgtcaccgaccaaaaagtccgccgccgcggcgttctctcgcagatcctttcgcgcccagcgactcggagatcgcagtcacagcagctgcctcgcccggtcgtaacgccacggccggctcctttgctggcatcaacaatggcggaggtctcaccggccatcttaggccctctgctctggacataccttcgccaaagccctacttattgcccatgtgcaggctgttctccgatcacggcgccggcgcgatcgggatgtaaagtttagccctcaatgggagggagcatgatactactggctaatcatagaatactaggagcgaagaaagaagatagtggaatataggtgaaacagaaaagaatggagaagtctaagcatagcggttagtcaagtcccttttcctttactttcctttccatttttttcatgaaaccaaacctcagtaggagcagatccacac

SEQ ID NO: 459555 - DNA, 418 bp, Sorghum bicolor
cgtccgatcagtctctatacataggccgtctataaatgggagaataagcgcgctagactggagagctgcgcatgctggacctgagcagctcacgacgccaactatgtatatgaactgtagcgaagctagacataagtccagctggcccgttagaagcaagaagcctgaagactgacggatcatacctgcaaggaactctacctcaacacgctaaagagatggtactgatgcgacacgtcattgacatgacaacagtccagcagctacacaacggagggagctatatcggcaacgctgcgtaagcgacgaactgatgtgcgctctaacctgagaataagatcgttcatgcggtcttatcagaagataccctgtggaaaacggaggacatgaatgacgtcttctcaccatacgactgtat

SEQ ID NO: 459556 - DNA, 363 bp, Sorghum bicolor
cgtccgcgcgttcccctcccgagcacgcaaccatggcgcgcccagcgtcagccaccgccgcgctcctcctcctcctcgtcctctccctccttgccgtcgcgcactgccggaccgtcgcagtcgtcgcagcagaccacgccgccgagcccgaatcaaccgccgccggcgccgtggccgtcagcgacgagaatgggctatccaaccccaccctccccgccgaggcgggcgccagcgccaccgaggagaggtcctcccggcggagcagcagcagcatgggttagaattcctccggctgccgttccaccggcaccaccgccaccgtccctgcagcctagaccaacacctgtggtggaagccccacca

SEQ ID NO: 459557 - DNA, 122 bp, Sorghum bicolor
gcagtacggtccgaattccggtcgcccacgcgtccgggcggcagcggtgtcatcagcttcgcgcccaggacgctctacttgacttctaagcgcgtcggagctgccggcccgcagccccctac

SEQ ID NO: 459558 - DNA, 237 bp, Sorghum bicolor
cgtccgagtctcggcagtcgcccttgccagcgaccaaccgcgccatcgctctcccgcctccgtctgaacctgccaccaagcatcaagccatggagacggcagcggcacctaccacggcgccgcacgtgctagtggtccccttccccgcgcagggccacacgctgccgctcctcgacttcgccggcctgctcgccacgcggggcctccgcctcaccgtcgtcacctcgcccgccaacc

SEQ ID NO: 459559 - DNA, 460 bp, Sorghum bicolor
cgtccgctttactgtttttttttcagcatattgtgacattctatctgcaactccttccaagaaaaaacatgaacatttgaacatgccatcccaaggttcacacattaccactaggcgtagcagcacagttgaaacttgacaaccatgttacaaagaacctgctaacactactaacagatctacgataacattcaactctgaagagccgatcacatatgtacagtaacactcaactctggacagaatgcatgagttatctactccgacagaacgatctagccataacagccagccaagctgcacaaaacgtgggggctgtgaagtttcctccttcataaagactaccgattgccgtccaatgtgatgaactcatcagcatacatataagagactggttctcttccatggcctcgcagagaactaattcttgagtccaaaacagccagcttagagatgaccc

SEQ ID NO: 459560 - DNA, 178 bp, Sorghum bicolor
cgtccggctggctgaaaggccgacgctcatttgatcgaagatgtgcgtcaactaattcatcctgaataactcaccatgtatacagacttgcccaaacgtgatgtgctatacaagtatatatatgcagtactcaggcttacccaagaagaggaagcaccagcaccctgacacacgatta

SEQ ID NO: 459561 - DNA, 500 bp, Sorghum bicolor
cgtccgatatccatccccacccaaagcaagcgagcagctcgaggagagagtcgagtgaagaagaagaaacaaaccacccaccacgacgaaatcagacgccagccacgagcgaaccaagggagggagggagggaggcggatgggcagtgcccgtgtttcggcgggtcggcgcaggcggcggagcaggagcggcagcgggcggaggcggagcggcgcgagtcgcaggacgcccgcgccaaggccgccgaggccgcgcagcggagacagcaggagtatgagaaatcggcagctggaagggcagccaaagcacagatgaaggcgatgaaggaatccaagacatcaaaccatggaggaggagagccggttcttaagacttttgatggcaaacaggaaattgattgcgactaatttctgataggatgcactgtgattgtgtgattatgccaagtgagtgtaacatcggttttccatctgctatactgtacatgctacccatagact

SEQ ID NO: 459562 - DNA, 562 bp, Sorghum bicolor
cgtccgtgatactctgccagtttccttgctgtaactgcatatcaaagtttgttttctattttggcttcttgcaaggtcaacaggaaaatttcactgtagacgaatgtatatagttgttttggtactaataaagttgaccgaggacttaattttgcagaagatggcacatgtttactatttctctagtcttcaaaggatgactttcgtggactccgtgaacaagttcaacccacactgtagttacatggagcaaatagttggatgagcttactgatgtcatggaaaagttgaacctcaagtcacgaggtagcacaatgggacttgatgtgtcattattcggttcctaacaagggactgttttgtgaggcacctcccctcctgtcaggtgggtttccgtacattactttctgttgagctgtctattgaaagatgctttcccatgaaaacaatactgtatgtgggccgatttcttcagctgctttggtatcaagcttctgccttgcctttagaaagagtttgatgaaagaaaagtgatcttatcaactttttttcatgccaggga

SEQ ID NO: 459563 - DNA, 264 bp, Sorghum bicolor
ttttcacgacagcaaatctgttaattgattgaaaaattacttactcaaagcacactacaaatacaggggagacaaactactagagcaacaacaactacagcacgcacgcacgcacgcacgaggccactgcactgaaagggaccaaacggcgactgctagccgatgcacgcgcagcgcagtcaaaaagcgaaacaccaagcaacacatgggaaagatgtgtcgccaagtacaaggacccactcaggacaattagatgaacataag

SEQ ID NO: 459564 - DNA, 550 bp, Sorghum bicolor
  unsure (1)..(550): unsure at all n locations
cgtccgccaatccggacgaggagatgccgcggatccctctgatcaagttccccaagcggaatctgaaagccccatcggcgccagcgccgtcgcaacccgcagatcagcacgcgaccctcatgtcccggttgggggctaaagcagaggcaccatcttctggagggattaaaaattaccgctttaggtcagatgtaccttccccaccttctcatactgccgtaggaggtccagcttcactccttcctaagcgtaaacccctgactgaagaagaaattgaggctattatgttgggaggctccatctgatatcacctcatatggattggaaattctaggaacatcaataagatcgtatacctgaacttatttcctttgacctctgaaagagtgttactgaagccatgttgatatggaatttngtgtttttttaattgtctggaagtcagctgttgagacattcgtttccagtattctgcacatgtaactggccaaatcgtgaacacattcagttccttgcagaagaagtgttgatcatggaatggtttgcatat

SEQ ID NO: 459565 - DNA, 85 bp, Sorghum bicolor
cgtccgcgctatttgactgacacctgacatgcacagcatgggcagctggctctgaaggacgtcgacggcgtggccgattctggcc

SEQ ID NO: 459566 - DNA, 194 bp, Sorghum bicolor
cgcgtccggtcggaatggtcggcaaggtcaccgtcaactaactacgtgctactactagtatgttgtacatatatattgcgccgccatggatccggccaccatgcatattcctcctcgtcctcctagggctggaactcgtacttaaacactgttataagtgacgctataacagtgatctggctcaaatactacca

SEQ ID NO: 459567 - DNA, 471 bp, Sorghum bicolor
gcgtccggtaggctactaagcttattctcgaagttcctgggtccataggggtcaaggaacatggcgcactacttgctagaggtttttgtaagacacggatgaaattgttcctgaattcctgggacagggacgatttcctgggatgaggaacccagcttcgacctgttttctgatactactaagaaccgcctttctatacatgaagagataatagtatttgattgttttttaaaaaaaaactttggttgttaggagtgggactaatgttaactgaacccttggcactagcttccgtgtgaaatcccttgcattttcttaactgaccttggcatatttttctgcaaattcacatattttatattgacatttacttcctattttgcccctattgtgatgtactccctccatcccaaactataagtcctgacataatatatttctgggtgcgtagcaaaagctatgtacctagaa

SEQ ID NO: 459568 - DNA, 538 bp, Sorghum bicolor
  unsure (1)..(538): unsure at all n locations
cgcgtactgcaggtcgaagagacaagagtgggcaaaatttgctgaatcagctcaggatatattgcaaaagatggatgaaatgaccaacaatgaagttggtcccaaggaaccacctgaacaaataattctagatgaggagtctgaacctccagtcgagaaagcaagggaaaagattgtcatttcaattcaggacaaggatgggcatcaacagatgcgtgtatacaaggttatattattttttttggcatggactagcattgctgctgttaatactcatatatacaacctccctccccaaaaaagaatgtcatcctaggtttggattaagtcacttttttaaatttgatcacgtttatagaaaatagtaccaatatttgtacaccanaagaggtctattattttattgatactttattacagatcantaaatattagttttttttgtatataaccggtcaaagtaaagacagatngactcgtaaacattcttttctgggacaggagtatataactntgaatactaattacaggggcacat

SEQ ID NO: 459569 - DNA, 145 bp, Sorghum bicolor
cgtccgctacgtgacagccagcactacacactgtcccttgtcgacacaaagagagtttgtttgtaacaggacagaaggcaagaagaaagaaatggcgtcgacggtggcaagcctctcaattccggcgaccaccacctcccggtgg

SEQ ID NO: 459570 - DNA, 359 bp, Sorghum bicolor
cgtccggcctgaggaaatttcaaggacctgcttgctatggagctccccccaggaaacaccttaatgaaaatatcaaagctgcctgcgttgcaagatgatggtcctgccactgatagctatggtcgtttttccaacgaccgaggttccaggaacaggcgttccaggggtggaggtgctgcaagaggccggggtggttgggacactgatggtgaggatcgttccaggggtggaggcgctgcaagaggccggggtggttgggacactgacagtgaggatcgattccgccgtggtggcaggagctttaggtctgacaacgatagttggtcagatgatgactggtcaagcggtgggagaaaatc

SEQ ID NO: 459571 - DNA, 485 bp, Sorghum bicolor
cgtccggtgcgactcaagtgaagaggagcattcactgttgcctaggctggcttgacgcggacaacagtatcaccgaccacacgattatatgaacaagacctttcgagctttgggtagagtcatgagcgcaaaatcaccttttacgattgacgtgacgtccgatataagatgtccattctgtctattgggcgtgaaacaattgaagaatgcgattggaatttacaattccaaacacgcttctacccctatccaacctgaaatcaagatcttaccttatcagctcgaccctaccgtcggccttgaaccaaaagataaagctcaagtcatcaggcagaaatttggggatcgggcagaggggttgagtgagatgatgaggggtaagattgttgctgctgggtatcctgagccaaagaaagacgccacgaccagctcgagtcatctcggtcaaagactacaagcttatactctttcgaaattcccagaaa

SEQ ID NO: 459572 - DNA, 233 bp, Sorghum bicolor
cagccgcacctctcttcttttactgggagcaagagcgcactatactgtcagcgtgaggtaacttgatacatgataaatatagctgctgccgacgcactgttgatgtgaattcagcatggctgtatacaggaccaaaagcaaaactaaacccacacaacaaagcttatcactttacgcaataaatttatcgtccacacgagggcgcagaattagcatgacaaaagcatgtgaac

SEQ ID NO: 459573 - DNA, 434 bp, Sorghum bicolor
cgtgcggtgtttatttagggttcaactcgtgtctcctgggcgaaatccgcgaagaatgcattagtttccggatcgatgcgatgcgtgttcaattcaatcgcctagcgatgcgattggctatttcttcatctgttaaattgatataatcacccggtcggattttcttctcaactttctgtgtccagagaggagacaatggctggattatgcagggctctgcacaagggcagatcacctccggagggccttgaccaatacgtagcagatttcgaggaggccacattcgagaaagcaacaggatcgactacatgaaaatgatatctatcagggtcagtttcggccaaaaagaggcaaaactaaaggctaagattgctgcagaccgtaaacaaaagatgcaaatggtgcaccagatgaatcagtcggctaacatggtc

SEQ ID NO: 459574 - DNA, 223 bp, Sorghum bicolor
  unsure (1)..(223): unsure at all n locations
cgtccggttggcgacgctgaaaaccgaagcaccgaacacactgcgcacacaggacacgcacactctgcagctagcccgtatcgcaatgcnccatgcttgcctatctactccacggcccatccgccgccgtcgccgcggcgccaagcgccttccccctccgttgcttcccaccggcgaataccccgtttcttccctcgctcccgcacccggtttagtcgaggct

SEQ ID NO: 459575 - DNA, 399 bp, Sorghum bicolor
  unsure (1)..(399): unsure at all n locations
cgtccggctatttctgtgttttcttttatgtatgtctagcaaaataatatagtgtccattaattaataagatggcagcagagctattctatacgacatgtcttcctcaattctttgaacagatatgttgatgaatctttacggattggaagagatgacaaagagaacatattcgtgctagagagagcagacccatcagaagtttgacaaacttggtgatgcagatgatgggcacagctgcacaggcggttcataattatgcgacaggcggaaaagatagcactcttggttattgacagtacgatgcagacattctactcaaagtaaaaaacttttcttgctcaaatgaagtagctatatatacacacagacacatgcnctgtttttttattatattgtc

SEQ ID NO: 459576 - DNA, 112 bp, Sorghum bicolor
cgtccgcccacccgaccagtcactgacaaagaccctgggaccgttcttcgtgcgctcgtacactgagacctcattattcagcccgaagcatgtgcgcgcccgtttcaatggc

SEQ ID NO: 459577 - DNA, 87 bp, Sorghum bicolor
gcgtccgaaaaaaaaaaaaataaacactccttacatcctttactacctttactaaataactaacaaaaaaacctaatggtctcccct

SEQ ID NO: 459578 - DNA, 466 bp, Sorghum bicolor
cgtccggcaggaatagaaggagccatgggctcatggttccttttttggagggatagttaccttctcaggatcacgaggagaaacatcaattgttgcaagaatcaggcctactgaaccatgtggcattggtccctataacatctatagaaccaaaatggcatattgttttatacacagatgatgaagcagactctgcgcttcaatccccagatgatactgcatactgggcaagaagcaactcaactgaatacgaacttggctgcgaatccgaccacaacatgaaccactaatcagtcttaagtacagtacaagaataaaaatacaaggcagctcctcctaaccttttccaccattccatgtgcacttaccacatcctcgtttctactttatttagtgcactacccagttataaacctccttgtattatataatatttcgacccatccttatcactatagcatctacc

SEQ ID NO: 459579 - DNA, 335 bp, Sorghum bicolor
cgtccgcactactacatgctcatactactttgcacggagttgatgataacattggcaagagcaagaagatcttggctgcaatgtgcagagaggatggataggaacaagtggatcattggcggaattatcacggctctcgttctggccatccttctcatactctacttcaagctcgctcattaagcctgcctgcaggtaggtcatccccacatatctgtgttcagtaattgtgtgataagagtttgctgaatgatgtgtatagtgcaacacgtggctctaccagcatcatctgttccccctaaacctgttatcttgcccggttcatgttgtgtaca

SEQ ID NO: 459580 - DNA, 114 bp, Sorghum bicolor
cgtccgagccgatgccaccaggaacctctaccaacagtgctcgaatgcacttgctactgatgcgcctgcacttattgtaagtagagctggtcttacactcacaaacatgaccct

SEQ ID NO: 459581 - DNA, 515 bp, Sorghum bicolor
cgtccgggttatcttctggattgaatgagtacctcatttctgataaaagaaatgctgatataatcagccagaataaggagggcatttatagcatcctcggtaaaaaaatacagttctacgtagtttgtcatttattttctgaaatgctgagaaacatacagccgttcaaccttcttagcatgaagatgcaggcataaatgcaggatactggggtatgtttctaattggtgtttctttgggtttctatctgttcgttgacactagttcaaagggcaagaacaggaacactcaagtcatgaaaatctgggttcttgccgcatctttttggtttttggcaatcatctttgatagctatattgagagagtttctcggcgaatgtgcaacttcgcttatgttatgcttgtttttggccagaattttcaggttttatctatcctcacattagctgggttcgcctcatataaaaagaacctggttcttgaagatgcactcaatcaaaacatggctggttcat

SEQ ID NO: 459582 - DNA, 447 bp, Sorghum bicolor
gtccgattgggcgtgtggttgtcctgaatatgggtatgggcctcctctcaaggggaatcgataactggggccatctgggaggcttgcttggcggagttgccatggcatggttcctaggtccggcatggcaatatcagtatgtggcaaaggatggtagagcggttttcaaagacagggctccagtcctccgactaataaaggggtagacttgtgttgttttgtatgtacttacgagagtattcgtgaaaataatgtggaagagaagcaaaagggagaatggtgaagattcagacataggccgagcaaggaagtggcagaaaaaaaaacttttaactagtttgggtatcgaaacatttcattgcatggctaattgttgaggaaacacacacgaggagcttattgcttggtcggatcccggcaattgtcaaatctcaaagcccggacgtg

SEQ ID NO: 459583 - DNA, 189 bp, Sorghum bicolor
gtccgcttcctcgcacggtcgcgccgccaagcaatggcgactacggggccgctgctctcgccccagcgtgctcgccctgcgcatctgcgcggccgcctcccgcccctacatctcgcatcccccctatacccaccagcgaggcggctactccttcgccgagcgctgtcaaaacacacagctaagtcctca

SEQ ID NO: 459584 - DNA, 357 bp, Sorghum bicolor
gtccgacagctcatggcactcgtctccacctactagtcctccaccaccgccgtggaggcgctccccaggaatgggcagcagcgcgcctgttggacgtccttactcggcggcaagacgcttctgaagcacacaaactaagcagtacgaacgtggataaagtggcttgcctgatcatagctttatacattgaactcattcaatgtgttgtatactctgatgactgcaggctttgaaggatgaaattcaaagaactaacaagcatagttggagtttctgagagacagagcagtttcatatgaaaaaacaagctagaatgctttaacaagataaaaaccatcttcaagagaagtctttatt

SEQ ID NO: 459585 - DNA, 440 bp, Sorghum bicolor
  unsure (1)..(440): unsure at all n locations
cgtccgatcttttgcagcaccggcagcgctcgattcctgcaatccgccgctccgaatggactcagggtacaacccccggacggtnaagaaggtgtttcggtacttcaatgccgccttcctaataatccctctcttaccactgattcttatattttttattttctaccgttttttaattttcttttttttatcttattaattttaagttatttttatttatttttacattttttttattttattttttttttttttttcttttcgtctttttatttattatcttaatcttatcttttttgtttttttattttatttattcctaatatttatgatgttatttttatttatatatttttatatttaatttttttttttattttctttttatattctattgttaattatttactctttttattttttattacttttatttattt

SEQ ID NO: 459586 - DNA, 309 bp, Sorghum bicolor
  unsure (1)..(309): unsure at all n locations
cgattccggtcgaccacgcgtcncgttttttactattactacccgaagcggcttggccaagttctttttgtcgatgctccatttgtttttcagccaatgtggcaggtgcttaaacctctgttgaaatcatatgcctccctggtaaggttttgcgacgccaatactgtgagaaaggaatactttaatgaagaaactgtgcctgctgatttctgcaatttgatcccatgatcatttcttcagtaattgcaaaaatgtgcaggtgattttctaaacatcacctttattttatcaatattgatctaccgattt

SEQ ID NO: 459587 - DNA, 69 bp, Sorghum bicolor
ccctcgcgctgttcgacatatagcaaggtgaataccgggcagtctaagaaggatgctggccccaagccc

SEQ ID NO: 459588 - DNA, 374 bp, Sorghum bicolor
  unsure (1)..(374): unsure at all n locations
cgtccgtacgcaggcacgcagccgtggcgccgagcccccgagccctactcctcccgccgccgccttcggctcttcctcgcgacgcgacgcgccgctcgctctccgagctcctaggctccacctccaaggtctgactactacgccgctcctacgaccccgaggcgcctccaccgcgccactggcaagctaacacactttaccggagcaccatgggagagccgagcaaggagcttctggacctgccctccgaccccagacctcccgcctccttcatcgagtcgcttctcgctggcagggagcagcagcaggacaaggaagggaagcgtaagtcggngccgcccactgatcccttccccaaaagccaagttattggg

SEQ ID NO: 459589 - DNA, 346 bp, Sorghum bicolor
cgtccggctaaacagaattacagaagggatcaacagaggcaatatgagtttccgtgtgtcgctactcactttcctcctgttcgctgtgtgtggaggtatgcgcccaaatttggcaacaacggacggccgcagtgctacagtgcccagtgctggttctgctatcattgcatactggcaaaaaatgctacctgactctaccatgccatcagctatacgtgaccttttgacccccaataataatgctgatgcaaacaaagacaacccttacccgataccggcgtcagccttttatgggaaaagaagcaaacagcctaaacccaacaatcttctatgggaaaagccacaa

SEQ ID NO: 459590 - DNA, 235 bp, Sorghum bicolor
acgcgtccgctcagttctgcggcggcgattccattttcaaaaaaaaaaaaaaaaagttctgcggcggcgatggcgctctcctcctcggggcgcgaccacctcctccggggcttccacgcctccgcgcgggccctggcgcgggcggagccgcacgagttcgccaagcccagcgggtacctgggcagctgggagcccgcggccgagccccgggaggcgtgggcgcggctggaccggc

SEQ ID NO: 459591 - DNA, 447 bp, Sorghum bicolor
  unsure (1)..(447): unsure at all n locations
ccggtcgaccacgcgtccgctaaacagtcgttttaaaaagtccagagacaaaattgagccttgagtaatagtttagagaccaaaatggctattctgccaaaaagatacagtaaagacatgtaccttatgtatgtgcatgcatactcgatggttctgtaagtatacacatcctaccttttatgagcacatgtaagagagtagctatcgacatgtcacatcacttatatcagttaaataatacagaaccaaattgagttaagcttagccgtcatcaaaatagtctttataactcttcgcccaattaaataatctctgttattatcatatgtttactcaacaacgtagcctaagactaagagcgttttccgacgacatttccgcattgtgcaactacatatagaatcagattcccgatnaatggtttttctttttcacgaaaaaatgatc

SEQ ID NO: 459592 - DNA, 78 bp, Sorghum bicolor
gaatcccggtcgccacgcgtcgcacgcgtccgatgattcctaatcagcgatgagtaaggcacataagctgggacggtc

SEQ ID NO: 459593 - DNA, 294 bp, Sorghum bicolor
acgcgtccgcaatggcatgcatagcaaatgttgttaagaatgttgctgctgtgacttccacctctactcgaacaccaatctacaaggcatatgcgggaggagaaaatatcggtgatgtcactgctaaaggagaaagtgttggaaacattgctgatctgttgggaactggaatgagcattctaatcttctaaagcaatccatcactggtgactttttttgacgtctggtcgtgcggatatttttttagttcatattatgaggtgagatctgtggactgaataccctgaatagggc

SEQ ID NO: 459594 - DNA, 204 bp, Sorghum bicolor
  unsure (1)..(204): unsure at all n locations
cgtccggcggcatcaagtcggtcacggcgttctacccggagcaggcagccgccgattccaacgtcagcgtcgccatcaccgggatcgggggggacttcaccagcctcaagtccttcggctacttctactccttcttcnagggccttgggaaccgactgacatgtcttgttatgcttttgttttttttctttattttttttaatt

SEQ ID NO: 459595 - DNA, 322 bp, Sorghum bicolor
  unsure (1)..(322): unsure at all n locations
cgtccgatttcttctccctgtttgtatggacaaatttgggaacgaaccctagtctgtgtctcaagcagccaaagtagtgttcttgcggagcaaagctaaagctgcagcagttggtgaggatacaggagaagggcttgttggattctgcaaagacactcttattggctgattttttttttcccataaactggggccggatttgcggaagtgcaaccctcttggattaagcaagaacaaagcctcgcaatttaggattcggcacaataccatccaatttgatcttggacatggacaagcaatncagcacccggcattgcaccct

SEQ ID NO: 459596 - DNA, 391 bp, Sorghum bicolor
  unsure (1)..(391): unsure at all n locations
cgtccggtctaatttcactttgtatgcatcgtctcaggattatggagttagagtttgtttttttaagtgacattatgatttccttcctatagcaatactttggccatacctagaaaaaaagaaattaggcaaatacatgctaaatattagtacccttcatttattatgttatatagctnttacctttcaaaaatatgtcagtgccatatgatcaaaccttctgttagaaaccttggactttaaaagggaaacttactaaatcagaaaatcacgatgtcctaccacatagagatagatattagttaccttatagtttcataaactattccaaagcttaaccttcgaccccatcaccctttcagcccacaaagctactttttcatattgatag

SEQ ID NO: 459597 - DNA, 281 bp, Sorghum bicolor
  unsure (1)..(281): unsure at all n locations
cgtccgggaaccctgcttactcttggtccaacagattcttgcgagttctttcatgaccctttcaaggggcggagtgaagaaggtaaagtgcgtaaggttctaaaggttgagccaacaccagatggcaatggtcgctttttcaacctcagtgtccagaaccgacttatcaatgttgatgagagcatttacatccctataaccaagggagagtttgctgtcattgtatcaactntcaattacatcataccacaccctatgggctggagcacatttgcaagttc

SEQ ID NO: 459598 - DNA, 188 bp, Sorghum bicolor
gacccacactacccgtacgataattcttcattatgtacgcacaaatgcaggaacgaaccctattctgtctctcaagcaaccatagtaatgttctggcggggcaaatcttaatctgcatcagtaggtgaagatacaagataacgtcttgttacattttcaaagacactcttattggctaatttttttcc

SEQ ID NO: 459599 - DNA, 556 bp, Sorghum bicolor
tcgacccacgcgtccgtttcctaagtttctacttgcatccccttcttttcacggtggtcgtggtgccctcccatctgcaggggggcatccttccgatgtggacctaccttgctggtggtggtgctgctgaagtctgaagtaggattgttagtattgtagatattcagatagtattacataaactaagcatcataactatggtgtcggccaccaaggtagaaggtgaatattcgtttctgagcaagaactcttacctggatcaatctgtaggtgtgaagatacattctatatcaaattggtgcagaacacagaaatgagaaacttaaaagctttgcatgctctgtacaggatggcccaagtttacttgatatgttgcttctttcccagatggataaatttgcctggaaaggccaattggactatgatgttacttgtttgccaaattaaagtcattgaaggtggagtaattttggtggtctgattaaaataaatgagatccattttacagaatgaatattaaagtttttattatcatgatatttttatactattattt

SEQ ID NO: 459600 - DNA, 359 bp, Sorghum bicolor
cgtccggcgacgcgtccatccacgcgtacgattgagagtgcatgtactaagaatagtgtcgtgacctctatcagagcgtctttttttcttggcagaattactataatgacagttgcttcattagttgatgaaccataagcactacatgccaaataggctagatatttctgcagtttattagaaaatatgctatacagccctactgctaaccacttcagattcaaatgtgaggtggccaacaatctgaactgtaaatgtttgttcccgaaaattgcctggtaaccatgtgtgcagcatgctgtatcttactgaagttcatcattgcgtctgttccatggaattcagatacaaagaagttt

SEQ ID NO: 459601 - DNA, 318 bp, Sorghum bicolor
cctactatccactctataatatcactacattatcatccatcactaaattgtttccatcctacagcagggcccaatactactacgcggggagggataaagttaattatatctctacaattaaatgaacttttcttgattcatgtgtcttcctatctatctttccttattcacgctttgcacccttaccaatctctcattcattaacatgttactaaaacttttatatcacttactcattccatttaactatcttcttctcactcttttcatttccacaatttaccaatatctttccactaaatacacatccatcctttc

SEQ ID NO: 459602 - DNA, 328 bp, Sorghum bicolor
cgtccgtatattttctgtcgctgtatttattaacaaaacaatccattatggctcacttgacatctctgcttgcacatatatccgggcccggtatctttttctcaggtcgggtccttttccccttctgcgagtcgtgtagtactccctgaaggaactcttgcatccagcccccttgccttcctctaattcgtgggccccggtccttccttttatccttttccgtgtagtataaccagaacatatccattccgggagcattgcagagcatatcaccgttcttcgttcccctattttacccattcattttttttaacggccttctttcctt

SEQ ID NO: 459603 - DNA, 422 bp, Sorghum bicolor
cgtccggaaaaaggccaaaaagaagcggaagaagtgtaaccaggaagaaaatgttcaggtggaaggtaaagaagctgcagagaaagattcagtcccaaaaccagatgatgggaacaagagtgggatggatgttgatgaagaacaccaaggaaagtcgtcaaatgaaaatgcagttgctggcaaaaaacggaagctagaagaagttgaaggaagcattgtccctgtgactccgaaagaagatagcaccgctaaccaaagtctaagcaatggctttgctgaggataaaacaaatgaagatagtaacataaaaccaagtaaaaggcagaaaaaatcatctgaacctaagagtgtgactccttttcaacggatcaaggtggatagtgtcacatttgcagatgataggcttcaagataactcgtact

SEQ ID NO: 459604 - DNA, 181 bp, Sorghum bicolor
cgcgtccgtcaaatacaacggcctggtctgaaggagctgttcgatattgatttgaataatttaagggtaatagctgaatacctccgcaagggttatccatatacagacggggcctacacacactctttttctatttaccataaacgttccttttttttatctcatccaaaacactatccta

SEQ ID NO: 459605 - DNA, 271 bp, Sorghum bicolor
cggcgcgcgagcaaagcacccacaccagcgaaaaagcaagcagcgatggcggcctccatgatctcgccgtcagctctggtgtctccggggccgatgtttttatttggggccgcgcattcatttttttttatttttttttttttttttttatttttttttttttttctttttcttattttattttattttttttttgttggtgggtgtgttacctccatttttttcttttctttttttttactatatattcctttttattttatttcttgtt

SEQ ID NO: 459606 - DNA, 462 bp, Sorghum bicolor
  unsure (1)..(462): unsure at all n locations
ccgtgcgcggacgcgtgggtcctgtggaggtaaaagcgccgaccattgaatgcgtctatctgactgaggccactaggggaacattcctagcgatcggcgaaagcatcagatgggggtgggctgatattgtatatanattanantangacctgggtggtttgctttggatgtaagatgggcttgttctatgctggaagttgaggctatttctttctctctataacacaaaactcatgataaaccgtaagcaatttatcacgcaacatggcttttaaccttctaatcttttaaaccctgcaagctcacaatatctacctttctgacttctttcatcatagttctatcatatttctatcattattgaataactatttccaaaatatttttctcttgatttacagtcataactttaacttagttatttcctatttatatctaatgtttcattcatttgttctattt

SEQ ID NO: 459607 - DNA, 384 bp, Sorghum bicolor
cgtccggacacgggcgaggattacccggctgctctgctcggacggagcggtctccctgcccacccggatcacacacatcgggacgccggacgaggaggaggtgccacgccgttactcatcagccgatcaacagacgtgggcgctgtgaggtccactaccgacagcgaaagcgcagttgatgctttggattcccggatgctgtgccataggtctttacggagagcgtaatgcagcgagcagtagagttcaaagctgttaaagtgcggatgagtactatgaagaaatccgacacgaaagctgtcctccacttcgtagagtgtgaggttaatgtcaccacatcggctggagttatcatggttgacacggcactgatggcttcatatg

SEQ ID NO: 459608 - DNA, 78 bp, Sorghum bicolor
cgtccgcaccagtacgagtgctgcggcatgtcggaagagtgcacgcccgagtacatcctcggcgtgcgcggcaggttc

SEQ ID NO: 459609 - DNA, 313 bp, Sorghum bicolor
  unsure (1)..(313): unsure at all n locations
cgtccgcgtctcctccctgcctgaggccccgaatccatctcccccaccaaaccggagcattccatcctcggaggccggacccggcgagaagcgagcgactgcagggagctcacgtcccctctcgatccaccatgctcaaggtcgcgggcaggcgcctctcgtccgctctcttctggcgccccgccaccgncggcggcggcacccggggccctttttccggcacgctacccggccgcgacgacgacgacacgcgcgaccggaaggcgcgtttcgccatcgactcttccttcttcggcgccgccagagggttttc

SEQ ID NO: 459610 - DNA, 516 bp, Sorghum bicolor
  unsure (1)..(516): unsure at all n locations
cgtgcggaggaagatgaagggcctgtttcaccgttacatctcagtgaagatccagtggatcaatctgctcatgctgatgccataaagactgcgtcgagctgaagctgtttgagtgggaagatttttgacagaaatagttgggatatgtgtgacagtgaagaagccataaaacatgggaaagcttttgaagagcaccggaagggtcactacgacgagtactcataagatgaaggaactgcttcagaagggaaccatgaatgatgacgcanatgaagatgagagtgaagtaggcaacaggaaggcttgacgggtctgtcccggtctgaactcgggaacgtgacttagaaaatccacggtatcatnagaagtgtgttagagtactcaaggactactactagacttatttgctatgcataactgcttcgtcattttctgcataaaacttgccagttccttcccttatcatagtaataaggaagttatgccatgacttaagcttttttgtaaacttcaccc

SEQ ID NO: 459611 - DNA, 436 bp, Sorghum bicolor
cggccgggaaaaaagagccaacaatggacaccgccgcctcatggcgcctcctctccccggcgtccttctccccgcctccctgcccggagcagctactacccaagcggctagcagcgttctctttctttcctcattctcacctatatatctttttccactccaaatctactctgttctaccacctcactaatatctggtggcctcacaaagtcctgctttatttttttctttgtccgttctaaaaaatttattgttcctttctatgcttttactctcactcatacaatttacgacttccatattattcttttccactactttatcatttattaatgttttcttatgctttctatttttcttttccccatctttctctatcatttcgctctgctttttttctacattatcttttattgttcctactttttcatatttc

SEQ ID NO: 459612 - DNA, 452 bp, Sorghum bicolor
cgtccggccgacacagggaactccgctaagtcggatctgagtgaagtgactcgtcaatggttcaaaccgtatggctactgccatggttttctccgagatccaaccggccgcttcttcaacagcttggttcactctgattttatcgcagagattcttgggcgctacgaagctcctctgacctacaagcgcacgaatgtcgggtacccacacaagttcggcggtaacttcgccgtgggcggcgccggcgtatctgaggttcctcgccaggctcctacactcgccagacagatcgacgacttccagatgatgctcgaccacgacaggagcgttccggtaatgcagctcaggcagtccgtcgcgctggtcgccatctgcggcaacgactaccgcccgcgtggcgccaacacgagcagcgacggcgccgacatcaccggattcgtcgggaacgtgac

SEQ ID NO: 459613 - DNA, 147 bp, Sorghum bicolor
  unsure (1)..(147): unsure at all n locations
cgtgcggggtcacatctgctacaccantccccgctcaaatttaaacacatcatgtcgtgccacctttgctgtggctacgtcggtcacctcgggcccatccctatcccagagtggagtcaacacttccacccatacattacttgcatt

SEQ ID NO: 459614 - DNA, 481 bp, Sorghum bicolor
cgtggcgggcacgcgtacgatgattatcttcttacagtaggactgtcgccatacctagaaaaaaaagaaattagacaaataccggtcaaatgggcaggcccttcatttgtggtatggcataacttttacctttcaaaaatatgccagtgccatatgatcggacctttaggtagaaaccttggacttcaacagggaaacttactaactcagaaaatcatgatgtcctactatacagagatagatattagtcacctcataggttcataaactattctaaagataaaccttcgaccccatcacccttcgggcccataaagctacttttctatattgatagatttcaggaaacaggatattttaaatctccattttcaccaaaataaggtagttgatgcttataacaatgataaattctcttatgagatttgcagttcttctaaattctcgtttaatgaatatgatcaacattcatgtgattcat

SEQ ID NO: 459615 - DNA, 143 bp, Sorghum bicolor
  unsure (1)..(143): unsure at all n locations
cgtccacctactttctctctcgncttccntctcaatatccacctccttctacactaattatcctctcatcctccatatttttcccgccgcgatattataataagcgggagcttaactcttttttttcacttttcttatctttt

SEQ ID NO: 459616 - DNA, 365 bp, Sorghum bicolor
cgtgcgcacgaatcatattttatcgtgcatcccttattctgtctgtgactctacatataaattatgaatgctaattagagtctagaagaggaacatcttgtatatccgggggggcgtcaaatgacaaaagttgtatgtattgatttctttcagctggaatagaagcatggaactactggcctgcagatatgcaggcgctggaacaactgctaagataataagaaatagtcatatgtgctgccaagaattcgtgtcaatcggttgcatcatcacagggaacacccagctgtttcattcatggggatgcccctccgctaccttgttggttcctgcaatcctcatggcaacaatgcaatcataatatg

SEQ ID NO: 459617 - DNA, 164 bp, Sorghum bicolor
  unsure (1)..(164): unsure at all n locations
cgtgcgagcgcaaataacttgctccactccaacgctcgccccctaccgagagcgagagccatccgccgcctgtcgcagacagagccgccaaccagattcccaccgnccaggcaccaaccgcgcgcaatggaggacgacgcccgccaccttcagggcccgacacc

SEQ ID NO: 459618 - DNA, 179 bp, Sorghum bicolor
  unsure (1)..(179): unsure at all n locations
cntgccgcaaacgcatatgcaataattcccaattcagcgccacccttcaagcctcctcctactccagaccggccacactctccatgatctgatactcttaacagagagaagggatagtctctcaaaaccaccaaaactatcaaatctccaaaactattcattctacctatcaaccaatt

SEQ ID NO: 459619 - DNA, 553 bp, Sorghum bicolor
  unsure (1)..(553): unsure at all n locations
cgtccgtgattaaaaaaaaaaaaaaaaaaaaaaaaaaaaaaaaaataaataaaatattaattttaaaaaaaataaaaaaaaaaaaaggaaatgtatttttaaataaaagagaaggattaataaaaaaaatataaaattaaaaaaaataaaataaaaataaaaaaaaaaaaaaaaaaaaaaataattttggttttnttggggtgattttttaaaatttttttttttttttatttttaatttttaaaaaatattattattttttattatttattttattttattttatttttttataattttattattaataattatattttttaatttattttaaatatttagtatttatttttatatttttaatttttnttataatttaattttgtttttgattgtagtgtgtttagtttttatttatttatatattatttatttttaattttttttttattaaatttatttttttttttatttttatttattttatttattttaaatttattttattataatttaattttaatttatatttaattaatatttaattaatatt

SEQ ID NO: 459620 - DNA, 478 bp, Sorghum bicolor
  unsure (1)..(478): unsure at all n locations
cgtccgggagcaagcaagggatcagctacgccgacacggacggcgatggctacatcgacgacagcgaggtggacggcctcatcgagttcgcgcagaagaacctcggcctcaagatcgtcgcctactaatctcgcatcccgcagggggcgcgcgcggcgggcggcgggcgctggctcgccggcgacgactcaccagtcaccatcactctccctgctgccggctaaaataagaacggcttcatctatcgcttgtctgttaaaacttgctctctttgtacttagtcaattcgatcatgcatatgcactagctctatgtgtcgttgcgtgatctatgtacggtgtgtatggtactcatgcgtggctgtctgcctgcctcgatcggcttgcatagcctagctcctccggccgtgccatgcatgggtgctgtctgtngatgttaatttgctccagtgaaattgacagtataatgctgcttgacc

SEQ ID NO: 459621 - DNA, 272 bp, Sorghum bicolor
tgcgtccggtgaaaccaccgccgcagcgcgcgcagtcctcctcttcttcccttcttccttgcgcttccgccgccggccgatctgcctcccggctcccgccgcctacgagctacgtacgatccgactcgatcgtctccgatcgaaggcctgccagagccggacaaggatgacggccgccgcttgctcaagccaaagccacccgttcgctgctccaactttcgccgtcgttggcgaagatgaacgctaccgcgttgtagactcttcttcgcaac

SEQ ID NO: 459622 - DNA, 145 bp, Sorghum bicolor
  unsure (1)..(145): unsure at all n locations
gaagactcaataccaccaacccagcagcagggcacaactaccacaaggcagtgtctgcggcggcggacggcattcggtagcggagatgaaggccacgctcaagggccgctactagggcgacaaggctacggncgncaccactctc

SEQ ID NO: 459623 - DNA, 277 bp, Sorghum bicolor
ggcatcacaccatgagccgtgctaggtggcagaggcacagggcagcgagctgcacctggtacatgccagagcaccaggcggtcgcatcgtggtgggctgcattccggaccgcgtgcggacgtgcgacggctagctggaggtgctggagatcacagtcccataaggggcacgagctgacgttcatacagggcgggcaggaggaggtccagttcatggacacagtcgtatacatcgagggcgcatgcgtggatgcattgctacaatactgcgatatatg

SEQ ID NO: 459624 - DNA, 477 bp, Sorghum bicolor
cgtccggctcgatcgacgatctccccctccggcaccacttccccccatcgatctctcctcagtcccccgccgggaagctacgctacgaagcatggcgtccgtcaccgcccgcgccccggtcgcggccctgcgcccgtcggcggcgtcgtcgctcaacaagtcgtcgtcgtcctcggccttccttggccactctagccgactcggccggaccgcgtctacgacgaccacgggcagacttatggctggtgtcataggccagggtgctttcgtacttacttaatccgatcatgcatatgcactacctctatgtgtcgatgcgtgatctatgtacggcgtgtgtggtgctcatgcgtgcctgtctgcctgcctcgatcggttggcatagcctagctccttcggccgtgccatgcatggttgctgtctgtggatgtttatttgctccagtgcatgaaattgaccagttaatgctgcttgacc

SEQ ID NO: 459625 - DNA, 102 bp, Sorghum bicolor
  unsure (1)..(102): unsure at all n locations
cgtccggaacttctagatggggctgtattaagtgctggtaataatggagataaaccttccctatctgngaagacctnttcttttgtacgatacatatggttt

SEQ ID NO: 459626 - DNA, 160 bp, Sorghum bicolor
  unsure (1)..(160): unsure at all n locations
gtaccgtccgnattcccggtcgaccacgcgtccgcggacgcgtgggtgcagcctctgttgcatggagaccgatcaaattgaaggtgtttcagggtgcaggttcttccagctgataggtcatgacgggaatatgcatatatggtcaccacgtggtagcgtt

SEQ ID NO: 459627 - DNA, 337 bp, Sorghum bicolor
  unsure (1)..(337): unsure at all n locations
cgtccggcggtgttggcagacttggaagcgggcttccaccattctgcttcagtgcttccgttgctgaagacgaacagttctgcaagtttgagctgcttgcagatggcatcatgaatctctctgactctctgaggaacaggtgtagattttggcaaatgttggagagaccgcaaatgtaccaaatttatgtgaatcatntgtgctcggattagccggacggcacagcttacaaagttaccgagcataccgtcgcttgctcagtactgccattcttgttcataaattcgtacctctgaagatcaccccaaaagttcaaaatggttggcatttctgcacc

SEQ ID NO: 459628 - DNA, 335 bp, Sorghum bicolor
attccgggtcgaccacgcgtccgtgataaacgtgccattcatacgtaaaatcgttcgtagatgggttggtagcttacatgctggacaacatccttgacatcaacgaaagcgcggaggggaacgacagatgcaaccactgatgggaaaacgtttggagcttgaagaaagactctaggagccacgcgttgtactcggtgccgtacaatctgaacaaatacttgcattaagtctgatcttaatggcgctgctaaatgaattcttgaaccaaaccggggatcatatgtgaacataaatgtgctcgtcttgccagtggaaagctcttggcaacaatgttg

SEQ ID NO: 459629 - DNA, 248 bp, Sorghum bicolor
cgtccgcgcaggtgcatgagacagagggatccggcttcgaacacctcaatatcacccacgaattcaccatgcaggctgagaactatccagactactcagatggtgtgaacactgagcgagatgggtatttcagcaggaggcagatctaccagcatgtgcagctatggttagagaatgtcggatggttggcactagaactacatatgatacagtatgtcttgctcaagctcgaggaagagcacgagtac

SEQ ID NO: 459630 - DNA, 297 bp, Sorghum bicolor
cgtccgggtggcctgcagcccacaccacgcatcgcgtagttggctcgcgggacccacgcgttagcatcgcgcctccctctcccgaagctagcgtctcggcgtgtggtactccacctgggtgcccggacccgagcggcctgagcccgcgacaaaccaggctcgcggcggcggaccgcaccctcccacggttgctcggcctcgtatgcgctagcatctctaagaggttcagtgccccgtaagatgctttgggtcagagcacgaactacgtctctgtgtgtattccttagtagtataggg

SEQ ID NO: 459631 - DNA, 76 bp, Sorghum bicolor
cgtccgctattgtggtgagggcggagaccagccctgaggatgttggtggcatgcacgcagctgctgagattcttac

SEQ ID NO: 459632 - DNA, 210 bp, Sorghum bicolor
  unsure (1)..(210): unsure at all n locations
cccgcgtgcgcccacgtatangggaaaccagctgctgctgctgcaagaaaacacatgtacacagacagcagcatggccggagtccaagtgacggcggcggccgtcaacgtggcggggctgaaagggtcaagggttggcaacaccaccggcttgttcgccggcgactggaggaggaaggctcgacgccccgcgtgctctgtctgggcgctc

SEQ ID NO: 459633 - DNA, 165 bp, Sorghum bicolor
  unsure (1)..(165): unsure at all n locations
cgttcggngaaaggatcgattgacaggttgtgattgtgttgattgtgttggctttccttgtagggcgtcgactcgcaggaagaaggaagccgcggttgcagtggaggaatcgatcgagtgctatgttgatgaaatnttatatcangaatcctttattttttttat

SEQ ID NO: 459634 - DNA, 279 bp, Sorghum bicolor
  unsure (1)..(279): unsure at all n locations
cgtccgatcggatccacgccctctgcgccgccgggccggttcctcctcctcctcctagatggcggcggcagcgccagagaagaggccccctcgctcgctctttgaactcgcctctgacttctttgattcatccgtcctccttcgggctcacccattcacggccccctctgcggtggaaccatccgaacccttccggtcaccgncgncgtcgacgacttagcagcagcagcagcagctttcagaggctttgggatccaggtggacgtgcaacatctgtgc

SEQ ID NO: 459635 - DNA, 385 bp, Sorghum bicolor
cgtccgcaacatccgaacaattccccacagctgtaaaacagatgctgaaccgaacaaggaacagcctgagtgagcagcacaacagcgagtaagcaaagcatttgccatgcatgcctcacgagctcctacaccggaacaatatagacaagcgaccgccggcggccatgattattctataagaacggcgctcgccgcttactcgtcggacgcactccaacgccgtcactcctcatcgacgaactcgaactcgtcctcgcggaggtgggtgaagaaccggacgggcttgtgctgtgccgtaacggcaccgcttgagtctccgacgtaaatcaccccgtgcagcctacacgagggtcggctcagcggtcggaggcagctatcacggcgt

SEQ ID NO: 459636 - DNA, 189 bp, Sorghum bicolor
gaccacgcagcaggctaagcagcatcttacttggggccaaacagaaatggcggcttcttgcgcctccaccctcccttcgctctccttcgttacctcctcttgcagtgcatgtccgtgatttaagcgctctggtgtggtggccattggccagcgttgggcaaaacgtgtatgcgctccgtttggtaggga

SEQ ID NO: 459637 - DNA, 58 bp, Sorghum bicolor
acccacgcgtccgtcctagtatctcggctggctccctttatgttgccatccgtgccca

SEQ ID NO: 459638 - DNA, 72 bp, Sorghum bicolor
cgtccggacccaaaccctcgtttctcatcacgccaccgcttaccccgccgccgtcgcgttggcagcggcgat

SEQ ID NO: 459639 - DNA, 150 bp, Sorghum bicolor
cgccgattccggtcgccacgcgtcgttaagaattgattgtgtgttttccgagagtgagaaaagacctcaatttactggagacagtgatgtaaacatgtagtcagacaggaagtaggaggtattgggaaaagttccacaatggagcgcttt

SEQ ID NO: 459640 - DNA, 249 bp, Sorghum bicolor
cgtccgagcaaatctacatttttctttgagtagaagtggaattattgctcttgatagagcagaagcagtaattgagataactgaatgggtggaagtggcaaagaagatattgactctagagagtaacaccaccaatcagaattcatcttccgaagtacgagcagctaatagcacaacaaatagtcaggaaaatatgagttctggcagttatactaattccaacactttcgctgattgagagttatgctg

SEQ ID NO: 459641 - DNA, 120 bp, Sorghum bicolor
cgtccgctcatgcgcattagacataggatgatggttatctacagcaggatatcgacatcaaattgctcattcctgctgcgaccggtaatgtcttgcgggataatgtagacactgaccgag

SEQ ID NO: 459642 - DNA, 55 bp, Sorghum bicolor
  unsure (1)..(55): unsure at all n locations
cgtncgacttctcatcacctcttgatcagctccagaacaggatatggctgatgca

SEQ ID NO: 459643 - DNA, 53 bp, Sorghum bicolor
cgtacggtcgctgtgctgcgcgccatggagctgcaactgctggtacgacccga

SEQ ID NO: 459644 - DNA, 175 bp, Sorghum bicolor
cgtgcggtcagtaagtggccctttgaacatgcaactaaaccaagcccctaagatgcttctcatccttcggaaaaaatgggctcctgctgcatgttgtgtatccttcaagctcgaaacagatcctaatatactcctacagaaggcagcaagtgctttggaaaagtatggtatgaac

SEQ ID NO: 459645 - DNA, 150 bp, Sorghum bicolor
gcgtccgacacgatctattatagatctctagctactgcagttggtgagacacaaaaggagattgaatctgcgcacatgaattcaacaactgcaggacaggaggacgagatacttacattggtcccataactcaattaattgaatgcctat

SEQ ID NO: 459646 - DNA, 53 bp, Sorghum bicolor
  unsure (1)..(53): unsure at all n locations
cccggtcgaccacgcgtccgaaaaaaaaataaaaatntaattatgtagtgagt

SEQ ID NO: 459647 - DNA, 53 bp, Sorghum bicolor
actacatgacctacatgttcaagtatgacacgatgcacggccactggaagcac

SEQ ID NO: 459648 - DNA, 270 bp, Sorghum bicolor
cgatcccggtcgaccacgcgtccgctgattgcatacccatagaggagtgatgcttcaagctgaagattttaccaaccaaattaccttggatcttgatataataatgcaagggcaatcatgtcatccaggatcataatcataaatagcacatccattagagttcttgaagtgaagatggaccatgctgctcgctcctagattttgcccaccgcacgtagctcatctgagctcatgcatgagcaatatatgggtttctactaatggcaactg

SEQ ID NO: 459649 - DNA, 62 bp, Sorghum bicolor
cgtccgcgacaatttactcgttaatttgagagatcctcataggccaatttgcaaggctggag

SEQ ID NO: 459650 - DNA, 287 bp, Sorghum bicolor
ttgggaactgtacttctggaaattcttcaactgagccatacatagtgtatcacaacatggcggggtgtcatgccaatagtggcagcatttacaaggaaaacatatcaagggaaacaaggtgcctatattcgaattacacgctctctcaagatgctactgaccatttcgaagtattccaacagatatagtaccagctgaccatggtataagacctcgcgctgcataagtactgcaccggctccttctacccgctgacgatttttcaagagacccctgcatagtttgag

SEQ ID NO: 459651 - DNA, 168 bp, Sorghum bicolor
  unsure (1)..(168): unsure at all n locations
tccgcgatcgtcgccacctcgacgcacgacggctgctcggctgctgcaagagatcggaacatcacagagctggcagctgcgcaggcaacttgtgagcgtgatccaggggagtngccgcgcgcgccactgtcatgtcactttgctgataaacgtcgccagtagcactgt

SEQ ID NO: 459652 - DNA, 82 bp, Sorghum bicolor
  unsure (1)..(82): unsure at all n locations
cgtccggatgtntntntatatatttttacaaaagatccgttgctggcgttcattgctaagagtagcgatctctccatacata

SEQ ID NO: 459653 - DNA, 112 bp, Sorghum bicolor
aattcccggtcgaccacgcgtccgaaaaaagagaaacaaatatatattttttaagtatcgtcacgcaacaactgttctgacggttctttttttggtgcaggtactagtgatc

SEQ ID NO: 459654 - DNA, 326 bp, Sorghum bicolor
tttttccatcattggaaagaactacatttaccctcccatacatgataattcttatgccaccttacattcttgattgaattgacgtgtaccaagtcacaccaatcagaggtcctcggaggctgggcaagtcttaagcacaggccccctggaaaaatgagaatacgctacgtctatagtcggtaataaattttgtgagagggttcgtttcggtaatttggtgagacacatctcgggtcgtacataggggttgtttagctttggtacacccaatagtccacgagacaccgctttttggtttgagactgcaaaccggttgtgctagccct

SEQ ID NO: 459655 - DNA, 60 bp, Sorghum bicolor
acccacgcgtccaggcacgcgtacgatcagctagcagcttccctcgtggtggatcgatga

SEQ ID NO: 459656 - DNA, 271 bp, Sorghum bicolor
cgtccgggcttgagtatgtggctggcagaaagtatgctcggttatcaacctgtttgcttatgcttattatgctattggtctcccttcagctgttactttttcatttactctgaagattggtggtgtgggcctttggttgggaatcatatgtgctaggcagtgcaaatatttgctttggtcatgatgatgcttcgaactagctagaatgaagagatgcacaagaagaagaggttgcaatggaacaatggaacaaagaggttgagttttccca

SEQ ID NO: 459657 - DNA, 279 bp, Sorghum bicolor
  unsure (1)..(279): unsure at all n locations
cgtccgcaccgccttctcttnctcctcctccatctctctctcgccggagccagatcaatcaatacacgctgccgtctcatcagatggctcctgtgctttccccaccgatgatcgcggacaccggcaccaagttacatgcggcctcatcgccagtctcgtgctccggtagcccacacccatatgccatcgcttggttggctggggccggaagaagaaaccggaactgtcgtcggaggactcccgggagaacgagcttgtaggtgaaagcggtggcggggg

SEQ ID NO: 459658 - DNA, 382 bp, Sorghum bicolor
cgtccgttggtttttttttttttttttttttttcccacgcgtccgaccacgcgtccgcccactcgtccaaccacgcgtccggaaggctcggaatgtgacgcgtcgcgctgacaacaggttcgacccgtaagactggccggatgcgtacaccaacgccagcgtccaccccaagctcgtcgagtacagcgccgtgtttcaccagcgccatggggacgacaaggaccccaccacggagcccttggacccagagcttcttataagtgtgggaggaggtaaacaccacggttcctactggatgggcaacaacgccattaacccgaccactacttccactctgagagagattctaaaattcaactttagcagtctccttcggcattct

SEQ ID NO: 459659 - DNA, 214 bp, Sorghum bicolor
cgtccgctgacggcacgggcccacgcttctgcaccaagacaacttcatagacccgtacctgctctgtatcaagatcatgcacactatcacaacagagaaggacttagctgggatgcaacatttcaacatcttaaccctggccaccgggctagcccaaatgaatctgctgaggctcacgatccggttaatgctgatggtaaccacacttgctact

SEQ ID NO: 459660 - DNA, 220 bp, Sorghum bicolor
atcgacatcactaatatgttatcaaatcataactcgatcaatttcaactcacgtcatatgcaattcaaatagatatgctcttataatgttaaaataaatgaagcttaaagttttctctcttataaagacaatctttcggttgtcgtagctccgattagagtgctttttcacgactgcgcgcttgtagcaaagtgtacattagttttcaaatcattcttat

SEQ ID NO: 459661 - DNA, 203 bp, Sorghum bicolor
  unsure (1)..(203): unsure at all n locations
cgtccgagaggatcattccggattcccaacgaatccggacacctntcgcaccggcgcctcacggtcacggcttaccgtctaacacgcacgcgcggcgggcccggcaacggaacgaagccccgatggcgagcttcttcgagggcgcgcgcctcccgcaacaacgggtcgtcgagggccttccctttcccgcggtgcttgtaccg

SEQ ID NO: 459662 - DNA, 225 bp, Sorghum bicolor
cgtgcggcccaactaccattcattccatttgcagtgttgcttggaccatatcttttactcctatctgtacagatgttgactgagatgctgacagtggcactggaaatcgccggtatggttggtagctcctgtggtttatgaaggctatccagtactacagctgatgaggaggctccagatagctgacgaaattattgcgcctggctggatagtgcacagtcttcg

SEQ ID NO: 459663 - DNA, 210 bp, Sorghum bicolor
acccacgcatccgcctgagagacactattacatacaatcataccatcacaattaacatcccattcccacaactcccttatttccactgataaatctcatgctggtaggggacctcgtcatcgccgataatgtcacaacctcccatattaagaaaaacgcctccaataactatctccaaatcacaaccagacctccgaatggactcatcca

SEQ ID NO: 459664 - DNA, 171 bp, Sorghum bicolor
cgtccgcatgagagacactagtaccaacaagcatacggataacaaaagaaataccaaaccggagacggccatgtttgcagtgatacgtcgcaagatgagtggttgaactggtcgtcgtcgataaggtcacagcctgccatatgtagatgaacggcgcgaataacgatctga

SEQ ID NO: 459665 - DNA, 269 bp, Sorghum bicolor
cgtccgctcgcaccagagtactctacccgcgccgcgcgccatggccacgaccacgaaccaccgccgcattgtggccctcctgctggtggcggccagactgctcgcgcaggccgcggcgtgcccctactggccgacgccgacgccgtccccgtcgtcgtcgtcggcgaaggtgaagccgccgccgtcgtccacgccgtgcccttccccgccgtactcgccgtcgaccccgacgggcaagtgccccgtgaacacactgaaactgcttgcgt

SEQ ID NO: 459666 - DNA, 90 bp, Sorghum bicolor
aatgagaagcttaacatgatggaaaatgtgcaaggtgaacttatagagagctttttgcctgttctcgacaactttgaaagagcaaaaatg

SEQ ID NO: 459667 - DNA, 304 bp, Sorghum bicolor
cgtccgctctctgatcaagactgacatggccaccgacgaggagcacctcaagctcgtcgagctcgacgctcacgagcggctcagcaactacgagtaccaccgctaccgacgtgcccatcatcgatggctaacacctcaaagcactcgaggccctcatggtcaagccagtcctaaatctccgagacaatgagctgcaggtctacataattaacccggatgaggaagtcgatgactatatgaccaacgcacaacagctgactcgaggtagggaacctgctcgattgagacgatgtggacttcatga

SEQ ID NO: 459668 - DNA, 343 bp, Sorghum bicolor
cgtccgggaacatgtgactagaggcaaggaggatcctacacctactgctgcagctcccccaggctccccatgtgttctatgcttgatgagttaggtttttacacttttagatcaagcctttgactatgaaatttgattgtttttttttgcagatttagaatacgacacatatcaattttgtgtgcttgcatttcttgattgttcaaattattcatgcttagttttattcatgcttaggtttctacgtaattttgatttaaaaaattgatgtatcccgcgagagacacctggtgagtttctatgcatgtggatggattggtctatgcattttttgcatgctgat

SEQ ID NO: 459669 - DNA, 367 bp, Sorghum bicolor
cgtccggcggatactcagtagcgacacgatcgcctgaacacgcacgcacacccacgttgtcagaagctgatcgatggcgggtcaggctctctctgtgggggcggcatctgctgggccgccccgccgtgcattcctccgttttcaggtcacctacaaggaatgcacccttcgtcgttagacaacagctccagccctgcaaccaagcaaggtgcccacaggcatctgttgttcgcgtacaagcatttcctctgctaccttgatagcacactaggcccgcgactattgattctaccagctggtgctctcgcaccctgagggcaccgacggcttcatctagcccaaatgaatggcctacggctatgtgatc

SEQ ID NO: 459670 - DNA, 139 bp, Sorghum bicolor
cgtccgggcacactgcatctcacaatattgatagagaatatgctgagagaaggatatgaatttatgataggacctccaaaggtcataaacaaggcaggggatggttatctactagagccttatatgatatccctctttg

SEQ ID NO: 459671 - DNA, 409 bp, Sorghum bicolor
cgtccgcacacgcgtgcatccgcacatgaaccatgtgaagagagcatgacatgaccctaatcagtgatcacaacatatcatacgaagacgtaaccatgcgggctgtgttttataaatgcatgccaccatatgcacacagctctgatcacatctgcatggctttctatatacatcaacatgccacgcgtaggtcgaccgatcagagcatgtgatgccagggccatgaccaattaacattctaaggcagctgaaagacacaccatcagccttgacctgtgcgtaggcatgaatcctaaccacagcgatgcaacataccaaatgcagtcctcagctgcagaacctatgcaagatcaaatgcaacacatggcctctgtttatggtagcatgtgacttccacgaatgcctgtgg

SEQ ID NO: 459672 - DNA, 333 bp, Sorghum bicolor
cgtccgactgatcccatccggccggcgacggccatcgtgactcccctgaccttttcccccgaccttctccagagaagagatcaatcaaatcagaggaaccaattagcagggagggaggggaggcaaggcaaggcaaggcaatggccacgacgactgaggtgagggcccgccgccgccgccggcgaagcgcggcctactgcggtacaactcgccgctggcgcaggtgtccctgctggggctcatctgcttctgctagcccagaatgttcaacgcgctgtctggcctcggcggcggctggcaggtggactccagcaccgtcgacaactccaacac

SEQ ID NO: 459673 - DNA, 492 bp, Sorghum bicolor
  unsure (1)..(492): unsure at all n locations
cgtccgctgtattctctgttaagatttcagttataagtttctgggaagcttatgaatctcatataaatttcattatccatttatacatctgttggaaggtagaactaggttcttcttgtgttatttttcttacaagaaagttcagaggttcacttccttttcatgactcangagactagcgagatttcagagccaccagtcatacctttgttgttatgctggttatatgatgcataatttctttatttgcatcaattaagatcaccctttaatgcacactttacttttatctaaacccactgcaatcttatttgatacatgaatgtgagatgtttatgcagttgttatttcttatttactaatgctcctcttgactgaaatttagaccagattacttggcagactgtagttggcatgctcctggtgagaacctgccgtcatgtaagccagcgtgcaagcataggattcattgtgccaaggtccacaacatga

SEQ ID NO: 459674 - DNA, 465 bp, Sorghum bicolor
  unsure (1)..(465): unsure at all n locations
cgtgcgggacagaccaaaatacgaagtaaggataataacttgattccaacaagagaagatgatttatcaccaaagaaaagaacatgtttgaatgagagtaattctgagagagcttccaaagatatggacctagtccacattatggataatcagcagaagcataacacacagagggaggtggatactatgagaacaacatctaggggaaatgatgagaagggctccatcccagcacaccagttggaactttctcttagaagaactgactacggaaaattggagaaccatgataaaaatgatagaagaacactgaaccattcaacttcatctgcattntccttgtataattgcagggctgtgtccacctcaggaaatgctggtgatggtcaattatgcagcacctcagaaacacttatggatgttgaaataaaaatggagattcggcagcttccttttcaagacatg

SEQ ID NO: 459675 - DNA, 252 bp, Sorghum bicolor
cgtccgactagaatacgcggccgttccctctcgagcgtgaccatggcctcccaggggtccctcgtcacgtggagggcagtcttcgctgctctggggtggctcatggcgaccacgctgcattacaccatagccaccgacagctcgtcgttccgaccggagcttctgacgcagtggacggtggcaacactgattgaatttatggaatgacaggcgactcggttgcgtttctacaagagcaactggatagtctgc

SEQ ID NO: 459676 - DNA, 187 bp, Sorghum bicolor
  unsure (1)..(187): unsure at all n locations
tattgtaataatgaacatcatataatctaattaagatngcaagattntccacttggacttcacaacaagatttacatccatgccaagaaagcgaactctgatacacttgcgttattccactaacaactaacttctcatattcacttccctttcatgaatcaagatacccgctctaaatgacagtccc

SEQ ID NO: 459677 - DNA, 254 bp, Sorghum bicolor
  unsure (1)..(254): unsure at all n locations
gaatccggtcaccaccgggacacaacacacaaccacaaagggcgggctaaggagcggaacgcttaccgtaggcgataagagtgancgttgcaccggcatggcggccacggcgtactccgtggcgctcctcggcggagcacgcctnccggnncgcccgcgctccgacctactaccttgtcgaaaggtctgccagcttcgccttcaagatgcaccgaggctctccctgctgcgtgcgaaggccgcgttcgaggaca

SEQ ID NO: 459678 - DNA, 99 bp, Sorghum bicolor
cgtccgcggatgcatgatatgatatatgagtttcactatgctcaagcaaatcaaataataatgttttttttttctctcctcttcattcaaaaaagaaag

SEQ ID NO: 459679 - DNA, 244 bp, Sorghum bicolor
cgtccggcacagacggcggctcggctcggcctcgcgtcctcgcgcggcgcgcgcgctcgcccaggcggtggccgcccgaaggcacgcaccgcgggcgtgttcggcgtgggtgggctcggcttggccggcgtggaggcgcgagcggaggcggcccgcctgcgcgcgactaccccggggcgacggcgcgcgcctgaggccgggtggtcggcagacgcctgaccctgcccacgcggtcttggcgggg

SEQ ID NO: 459680 - DNA, 349 bp, Sorghum bicolor
  unsure (1)..(349): unsure at all n locations
cgtccggacattattaaagaatcacatgggaggccttcaccaattgagtctcctctctcaagatctcgtacggctgaagaaaagcctatcagacgggcgcactcatcaattgcacctggtggttccatactgcctgagactagcagtgaacaaggcacatggcaaatgtggagcacaccattggttcaggaaagtttaggtcttcaaggtcctcagagtcagtggcttcggcaaaacacaaatcaattcaaccataatgccaacacgatttcaatgaataanaattatatataattattatttttagattttatttgtgttttttattatttgttttatattatttatt

SEQ ID NO: 459681 - DNA, 198 bp, Sorghum bicolor
cgtccggacacatcttctttatcacagacatcatcacacatctcctgtgacaccagacctagctcagattatactacatcctggtactgaggctgggacacatgatgcactccttgctggcacttgctactctggatgaccaatacctgacaagcatcatccatctgacaaatgatcacttatattcccatatcacaa

SEQ ID NO: 459682 - DNA, 223 bp, Sorghum bicolor
cgtgcggttcggcaacagcagcacaagaggtacccgagcgagtcgttagagacgtgcctgcgttcctgtgtgtgtgctaatgctacagcgtacgaccgcaacatcaacaactgcaggcattagcacccggcgcgagagcaccaccagcagcaggtggtcccagctttcgacaccttcgggcgctttcgcgcgacacctctgagcaatttcaaatttcgcgcgt

SEQ ID NO: 459683 - DNA, 101 bp, Sorghum bicolor
  unsure (1)..(101): unsure at all n locations
ttcaacctctcttccctaacctcgccgcggcacagcggtttcactgctcccctcacctccgctcccgaacggccggtctntgcgatggagcagcagctagt

SEQ ID NO: 459684 - DNA, 231 bp, Sorghum bicolor
aagctgctgcaagataaatattcagctcttgctcacatcactctgtattgtgcccagggattgctgatgctttgaaggactctagcatgcctgtacgcctagcagcaaaacgctgcgcccttcatgttttccagttgactaaaggccagataatgttacatcagcacaaaagtacctaggcatgactgggttgaagtgaaaaaaaatgccaagcttaactaggagagtgat

SEQ ID NO: 459685 - DNA, 440 bp, Sorghum bicolor
atcgtattgttcgaggaaggaagtgcgtacaagaggtccccgagattttggtcgagatggtttcagacgagatccaagaaggtatggtagagatccatactgggacagaagggatagggaacggagctatgatcgtgaaagggatccctaccatgacagggatagtgatagatcccgtgagcatgatagagaaagagattatgagcatggtggctttaatcgagaaattgactatcccatggatcgagatcatgaagtagacgagagacgtcctagagaacatgatcgtgcagctgaaatgcataatatggattcagataatgacaaagatagggagcatggaacaagaaaaaagccgcccgaaaggtctggattacaaagtattatcgagttccagtgatgaatcttcaaatgatggaaagcaccagttggataaacta

SEQ ID NO: 459686 - DNA, 194 bp, Sorghum bicolor
aagagtcagactgctcctgcgcgtgacgagacctgtgagcagggctactgtgccacactggggcctgctcagttagaaggaagctctgtccggagaactcactcgcgtgctctacacgcgtctgacatgggagcgcatgtcgtgaccaccgcgagttacagagctgagagcatgctctaccgcgctactcgatc

SEQ ID NO: 459687 - DNA, 411 bp, Sorghum bicolor
cgtgcgcggacgcgtgggccaagcccaccgtcacctaggccaccggcatcccggtcaccgacgtggacgcgctggcggccgaggtgggcgcggcgagccgggactggggcttcttcgtggtcgtaggccacggcttgcccgcggggaccgtggcgcgcgcgacggcggcgcatcgcgcgttcttcgcgctgtcggcgtaacggaaggccgacgttcggaggagcgaggctgagccgctcgggcactacgagtcggagcacaccaagaacgtcagggactggaaggaggtgttcgacctctttccgcgcgatccggcgtcatcagcagtcgtggccgacggcgtggttgtgtacatgaacaagtggcctgaggaccttccagggttcaaagtggcgctggaggagttcacta

SEQ ID NO: 459688 - DNA, 330 bp, Sorghum bicolor
  unsure (1)..(330): unsure at all n locations
cgtccgcgccttcttccgcgtctccgagatacttggcggtcggggcctctgcaacggcgaggtcggcgtccgcaaagaactcaccttcggctggtgggggtgcaccaccacctcctcgcccgcgccgtctccttctccttcgacggagtctcctccgcccgcggttgatctggacgcgttcgacanggagatgatgggcctaaggcggcttcccggggcgagtcggctaaggacttgtgcagaaccgcgctctgttcagaataaatccagtgtgcccaagcacaccttcggcacgtgcgcgagtgcgtgtctgcgcatgtggctgtaaga

SEQ ID NO: 459689 - DNA, 453 bp, Sorghum bicolor
ggacacacgagcaatgtggcgtgctatcagtgggatgttccgcaatcgaataattttttatgatgctgaggttcatgatgttcctcaggcgctgctcaaaagtcttggtgtgaagaatcttccagctgtaattggccgaaccgtgaatggtgaggagctccttctgaaggatggcatttcggtgaaagatctcagatctggaatcaaggaattgaagacactgctagaaagttttgagaagaagaataagaagctgtcatcgagtcaagctaacagcaaaccttccagtcaatgggaagaaaaaaaggtccctcttctcacagcttccaactttgaggaaaaatggggagataagacttcagaatgcatcattggtggtgtcggatcaaacaaagccaaggagcagcttgaaacagtcctggctgagatatttaagaagactctgataagggg

SEQ ID NO: 459690 - DNA, 436 bp, Sorghum bicolor
cgtccgattaagtaataataagactgtaaaatagtttttagccttatacaataaaagaagtttcatttttcctagtcctagttcctttctctacgctaaaactagaactccttccttttaaattataagttattctaaatgttcaagtgccacaatcttttgaagtagtgccttttgacataaaacccctcattaattgcagtaggacgcatgtagtttttctctaatgtggacaatttgccattatatatcttgccatgatatacagtgacttattatatctatatggaacacagcactaattacattttacttacatagaacaagtcaatgactggaaattgtgttatgacaatttctttattctacttgtacattctaaacaatctcatatattttgcagctctgaatgatgcactaaagcaggagctggaga

SEQ ID NO: 459691 - DNA, 320 bp, Sorghum bicolor
cgtccgggcgccggcgccggcaccggcactggggaaggagcgccaatcgcgccgcgcaggccggccctgccgttgaaggtgcggttccagctgcgtgtgcctcgacgtcgtcggtggcctctcgatgcgtcgcgacggcaccatcaaccgctccctcttcagcctcttcgaccgccgcgcccgcgctagcgcgcgcccggatggcctcggcgtccggtccgccgacgtgcacgtggacgcgtctcgcggcttgtgggcgctcgtgttctctccgtcggaggcggccgggtccccgctccccgtcgtggtctatttccacg

SEQ ID NO: 459692 - DNA, 206 bp, Sorghum bicolor
cacgccgtgccgctccatgctagctcgctcgcctgctcatcactgtcgcttgcttgcctcgatcgcaacgcgcttggcatggcgtccgagtgtggctatcgccacgtctcgcctccatctctctcacaacgcccacctgcttcgtccacccacctgcacacaccgctttttttccgcccgctgtcgggcctgcttgtgcgcgcgcg

SEQ ID NO: 459693 - DNA, 378 bp, Sorghum bicolor
ctgttggttcgtttcttttcttatctactgtgggcgccatttggttctggtgttttatgtgtgtcttcttttgtctttttttgtggttttttgcttgtctctatttttttatttattctttgtttattttagttttgttgttttttttttttctcgtatttattattgttttttgttattcatctttcttttgttttttctttattgtttttttttttttagtttatatattgtttattgttttatctttatttttttttttttactctctttttttatatgttatttttcttttgttttttttatttttattgtttatattttaattctatttaattttttttttttttttcttttttcttttttattttttttttt

SEQ ID NO: 459694 - DNA, 77 bp, Sorghum bicolor
cgtccgaaataaaaaaataataaaataaaataaaaattggttaaccgctcttcaatgtccggcctctctacagttcc

SEQ ID NO: 459695 - DNA, 439 bp, Sorghum bicolor
  unsure (1)..(439): unsure at all n locations
cgtccgacaacccctcggcccctggcctcgatctgcttctgctctccgctgcttcgttcgcgttctccactcctcttgctcctcgatctctccccctccggccggcaaccgcagcgatacgagctgcagcgcgaccacggaccaccgccggcgacacaccttgtgttgtacaaatacattgatatctgggagaagcgggagtcgatccagctaacgccgctggaccctgattgctacatttggagatggacaccgaatggcgcctactatgcttcgtcagcatattgtttgttcttcctgagcatgtcgtccctgctagggcctaaggaaccttggtgagccacaactccgtcgaaggagtctactacatgntgtgcttgcggtgaggaggatgagatggttgatcatctgctggcttgctatgtctacatgagagaac

SEQ ID NO: 459696 - DNA, 117 bp, Sorghum bicolor
aacaattcgccgccaccacacttttttcgcttcgcttgcaggaggcgcacatccagctcaccagcttcttaccgaccactgccatatctcacgcgggctgtgacaatattgagcaac

SEQ ID NO: 459697 - DNA, 409 bp, Sorghum bicolor
cgtccgagcacacgtacgagccaagctcgatgacattctcaaagctgatgtgcatgcacatgtgatactggattttatcaatgctgcacatgctcacctgcatgcacgggagcacatgaatgccaatcggacataccagaatatcccactgaacatggactttgtaccacacatcgagaaggcatgcacgatcgatatggcatcttatggagtcgccaggaagcaagcaagtgtacaggtgaataccactcagattacaactcaccctggcactctggctgcactactggcaaataacatgacaagtcacatgacaagacacatggttgttgcttatagaccgagttaataaccacatggttcctcacagggacatgacaagacacatgacatgacacatgattgttgc

SEQ ID NO: 459698 - DNA, 441 bp, Sorghum bicolor
  unsure (1)..(441): unsure at all n locations
cgtccggagcattcagaaggctgcattcaggtatcggcttccatttgacgatgatactgacccggtgcttgagacagtttacgactgtattgtggctagtaccatgctggggagtctctttgttatgattccacttacaagtgaggagcatcagcttttgcaagatgtccaagaaagactctcagtacacccattaactgcaccagtcttgggaaatgatcatgcagaattccgtcagcgtggtaccccttcagtagcgcctcccattctcgacggtgatatgcttgtgcaattcttggagctcactgnggaacaacagcaagccatctctgctcataccttgccagggaaggggccacagaagtccctctcggttttcgaggttttgagaacattagagcgtgtccattatgctcttaactgagggtttcttcaatcaca

SEQ ID NO: 459699 - DNA, 337 bp, Sorghum bicolor
cgtccggactagttctagatctggatatggtgctccaccaccccagtctggctatggcacccaaccgcctggatatggtcagggcgcttatgggcagccttctccacagggccagaaacctcctgcatcttcaccttatggacaggctccacctcctggatctgctcagggtggttacgggcagtatggttacagccaacctgcttacggtgcaccaccagcttaccctggtgcaccccattcaagccacccgggctatggtcagcaacaatcttatggggatgcttatggtagtggatactatgggcagcctccagcctactctactgaagcaaca

SEQ ID NO: 459700 - DNA, 578 bp, Sorghum bicolor
  unsure (1)..(578): unsure at all n locations
cgtccgaacgtctttgcaactggagagaaagttctcgaataaactgtggacattcccatatgccactatatggaaattgtctgattttgctgatgtcattttggcctacaaattaagttttggaagagatacagctggaaggaaactccattttatgcaagagatatacctgtgcatctaatgtttgggctatcggaagaaccaaatcaaactagagtactgtgtgaggtcaagaaggtacacttggaactggagataattcttgtacacaaagcaactgcaccaagggcacgcctagatttgcagttgtttcttgagtagtccaggcttctgccaagatcaccaccaatccacagctttntngttaaaataatnggcagttaagtcgtgtttcaccttgctcttgataaggcgctacagctactngcgtcatngctactatnngttcgtgtaagctgcataatgatattatatggtgatggtgtcaatttttttttggcatatagtccttgagacagagattaatcgcatataattcatggccaaactgtgaaaacactcataatatgtgctcagtg

SEQ ID NO: 459701 - DNA, 431 bp, Sorghum bicolor
  unsure (1)..(431): unsure at all n locations
cgtccgcccacgcgtccgcttcaaactacccccagcagttacccggccgagcaagcagagagcacaaacccaagaaacagacgaggcggagaggtagctagcttcctgaactaatcggccgggggtgtcgcaatggctgcagcgagtatgatcaaggcgccggtcggccagaatccgaggctcgcgtgccacgccccggcgaggggcggaggcgtggtcaggtgttcgttgcagggcgcggtcgtcggcggccgggcggactggcagagcagctgcgccgtgctgtccagcaaggtggccgcgctcgggacgcactccatcaacggccacgtcgcgccggcgccggccccggagccgagccagaacggngcggtgttgganttggtccccgtgactagtatcaccggcggcgccatcaccaaggcgaacct

SEQ ID NO: 459702 - DNA, 169 bp, Sorghum bicolor
gcgcgtccgcgaagttctcgccatcacctccagctccacttcaacctccagagccgctgccaaccgcctgcgggctgctgccagcgctgatatggtgaagaggcataatgtctaggtctgcttccagacacctgccctggcagttgcacaccatcgcgtctgctcaccg

SEQ ID NO: 459703 - DNA, 331 bp, Sorghum bicolor
cgtccgggtttatggcagtacaagctgggcaacatcatcggcacatgatttaattctgggaatttgtttgttgggtggagattgcttttctagattgcagaaatatgatgaggcaaccaatttgaggtctaatatgagatatatgttttttttctgaaagttatccatcatagaatttttcttcatgtgattggtatttatcttttcctaactctactaatctcgcatggcttctgtgtcatccaggaaacttggaatcactatgtattcaatgaggataacattctgaaaattctgaacagtgctattctgagatcattgatctactctg

SEQ ID NO: 459704 - DNA, 229 bp, Sorghum bicolor
cgtccgcaacactgttgtcctttgctttgatggtaatgcatgaaattcgaacatcgacatgtcttctgcatcttcaggtttagtgagatctggcctccgcaatagtcaccttcttgaaagcagatgtataaggcttattagagttggagttcgatctttggggacatgaattgattctgtatttgtcgctccaattggggcacacggcttaggtggtgggaatgcgtta

SEQ ID NO: 459705 - DNA, 236 bp, Sorghum bicolor
cgtccgctacattttgttaatggagataagttattgattcaacatcgtgataataacttgtattcttatgaattgcttgggatgaacttcaagattgaatttagcaagatggttaagctgttaggtttgagaccctggggagacgatgacttgcaattatatacctgtgtgaaatcacttgtgcgtttagatttatatgcaaatgctgctgtggcgtacccaaagatgcgggcgat

SEQ ID NO: 459706 - DNA, 214 bp, Sorghum bicolor
  unsure (1)..(214): unsure at all n locations
cggccggcacgcggcggcccccccacccaccagggggccaaccaggcgccacgcgagacgaagcaaacgcacgagcgcgacagacggcgcaccagnaancggggccggcggacagggccccgncaccacggaggcccagaggcgancaagcaggaaccaggagaacaaccagaggaacgcaacggcncgcagagaaagcgcaggccaggaagca

SEQ ID NO: 459707 - DNA, 445 bp, Sorghum bicolor
  unsure (1)..(445): unsure at all n locations
cgtccggagcccggaccacatcgccaaggtcaagtccagctacctcgagtccacggggcagcgctgctcggcgttcgacgtgtgcgtggcgcgcacctggcaggcccgcgtccgcgcgctccggctcccggacgccgccgcgcccgtccacgtctgcttcttcgccaacacccgccacctgctcccggcgacggcggcgccggcgagtgggttctacggaaactgcttctacaccgtcaaggcgacgcggccctgcggcgaggtggcggcggccgacgtcgtcgacgtcgtgcgcgccatccgggacgccaaggcgaggctcgccgccgacttcgcgaggtgggcggcgggcgggtntgatcgggacccgtacgagctcaccttcacctacgactccctcttcgtctccgactggacgaggctagggttcctcgaggctgactat

SEQ ID NO: 459708 - DNA, 435 bp, Sorghum bicolor
  unsure (1)..(435): unsure at all n locations
cgtccggaaagaccagatgaggtgaacaatgcacttatggatttgataaaggccaccaaatctgcgatgaaacctgaagagtggtcagcccagcctgagaacatatcggaaaccggggcactcatttctgcgagacccattaccgtcacgatgcaaacagatgaaggtgcaaatgctgccgtagcaatctataacttgcttggcaagctgcaactaagctttctttatctcataggggtgatagtcatggggtttgagcacatgaggaacattgtaaaggtaatgaagccagtaagggttgcagcagttgagtcataagatccgaaggcatgtaaactattctcgagaccttgtgggagtcgagatgatactttcacttctccccggtactctcggagatgatgattntaagagtactcatctccatacagatat

SEQ ID NO: 459709 - DNA, 245 bp, Sorghum bicolor
cgtccgtttgagttttgagttgcttttgctagatgtgttgagcctttgcctcttctggagggtctagttgttttctagcttttcaagttttgctagcggtgttgagcctgtttgcctcttcttgagggctagctgtgttttacttggttgtgtcgagccgttgcccatgtctttggggaccaagttgtggcttgctttactcattggaggctcgttgactacactaagtggttttgcttggtggg

SEQ ID NO: 459710 - DNA, 356 bp, Sorghum bicolor
cgtccggaaagaattgggaagggcatttttcttatacaggttgtgtaaccactggtgatatgagatgatctctattcgcttgggaagtagagataggttaaatttcaggtctgaatgggaaaccttaaataaagtcttaggatgctgtgtgaaagaagcatgctggtttctcgaagatgttgacaaagaatcgaggctgaaatactatggatgaaggctaaactaagtttgagagactgtgttgtgagagatgggggcaccggaattgggcaatggtctggtcaatgatgagtcttgaggagccatggagatattcttctagctatgccagatataggcatctggactgtgggtat

SEQ ID NO: 459711 - DNA, 476 bp, Sorghum bicolor
  unsure (1)..(476): unsure at all n locations
cgtccggtcttcgatatcaccacctggaagcaaacagaaatctgcctctgatgatagagatactactattgctgttttgcgccaagacaaatcggggggaaggttgggtccgcaatggattcggcccacacccccaagacttcctgtacttgatggggagctacaatggttgaaccctgacaataaccacgagctattatgggattatagcatgtgtgctgacacgagtcgaggggctgctatccgagatttgattgcaagagccttaaaaggttcacttgcacctgcccaacaggaggttcactgctacattctaatatttcttcaagatgatgatgattattnttatcaaattgcttgagctatgactaggatttcttttcctctttgtttcttatgataaattttatagccctattgctggataaatttatggcacctaggtgttatcactcctttttttttagacattcttt

SEQ ID NO: 459712 - DNA, 180 bp, Sorghum bicolor
cgggcgggccacgccgccacaaaggggaaggaacaaggccttcttcgcccccgatgcctccgctgctcacctcacccgcctcggcgcttcttccctctcctgctcgcctcccgcgtcggcgctctccaccaccgcgccgccgcctcggtccacttctcgcgccgcgcagagcccgccgag

SEQ ID NO: 459713 - DNA, 359 bp, Sorghum bicolor
  unsure (1)..(359): unsure at all n locations
cgtccgcggacgcgtgggttctgctccttcccctactcgcgctcaggctcggtcccagggatcggatcttctgcgcgtcggcggctccccctcggcggcgtccagcgacggaggggcagtcccaggctcggcggcggcggcggcggcgtcngcggctccccctcccgcctctcgccagtcgcctcgcgccctcgccttcgtccttcgcgcacctgccggcgaccctgcgataatggctcatcgtggtcacctagatggactgactgcccaagctccagctctgatgcaccatggttccttcgctgctggcaaactctctagccactcacctttgcagtcttcatccacactggagatgc

SEQ ID NO: 459714 - DNA, 66 bp, Sorghum bicolor
cgtccgaaggacagtacgctcatcaacggatgctggcgctgcaagcacacaagatcgtgtaatatg

SEQ ID NO: 459715 - DNA, 140 bp, Sorghum bicolor
  unsure (1)..(140): unsure at all n locations
cgtccgtccagaatctgtattaagttgagttgtatatcggtttttgacgattaattggcttgttgagaatattttgactnanaaaaaaaaaaaggaaagaaaaaaaaaaaataaaaaaaaaaaaaaaaaaaaaagggcgg

SEQ ID NO: 459716 - DNA, 303 bp, Sorghum bicolor
cgtccggagtcatcctggttcagattattcaggctgttgcattgatatgcagtgtttgaagtggaagatctttaagattggagtgtaacaaccaaaactcggtggaagcttcaatgcttgcctaaattcattaccactgggtttcttgaccttaaatgattagtgaactgggtggttccatttgtcacctgtacatgttggtgtttggtcaacttgaatgcaagctctgcttgaattggttctgtttgtgtagaatctccaaattagtatggttcatcttgttatgtggtgggttagtagtta

SEQ ID NO: 459717 - DNA, 347 bp, Sorghum bicolor
cgtccgaaaccccctacgccgggaccggagagaagggggggagccagagccagacctggcggcgctcggcatccaaaaacgacgcctaaagatccctccctctcttgtggcgtccatcgacctgaccgcggcggcgcgtgctgcttctttccgctctccaccgtcatgaagagtcagggaaacttgcatgtttgatgtacccagctgctttctgtaacaaaaactcttgcgatcaaatttgttgaatttactcactatcagggaggaatctattttgtcagttgtcggtattaaggctgctgaacgatatctgcagaataaatgggagaagcacactcggatgaatt

SEQ ID NO: 459718 - DNA, 416 bp, Sorghum bicolor
cgtccgtgacgaaggcatcgaagaggtcaccgaggtgtaccctacacaagtactacctcgcactgtgagtctcgcagccactccagctacaccaaaaactgctccaataacgtcaacatccgtcggtgtaccagaatcttgtcctgtcgtacaagcttctccaaatatgcttttgcggtcatctctgagcaatagagcaaagctcccgcttccaaccttcacagaagagtaaggtggttgcctggttgtgacgggaacacatatttttacactgccactgtgcaatgtaaccaaggatcggttgccatgcctgtgcgctgtcgcgactgaggtgtggccaaatgctaaggaatgtgttcatgcttcggatgcttgcactttctgtgtaacttgtacgagttaatggtactggtact

SEQ ID NO: 459719 - DNA, 264 bp, Sorghum bicolor
cgtccggcgatgagatgaggaggaaggcggtggcgatcgcgcgcatcatggaggctgcgtgggaagcgccgggcgggtcggcggcgcagagcctggaagggttcctgagatgcgttgagacgtccatccatgggtgcgcgaggaatcaagagttttgtaacacatgtagccgtggaacctgcaataagtatgcgcgggaaatctgaaggcaaccgatgaaaaagctgtgagaaattcaaaaagggcatcagctgcttaccatcc

SEQ ID NO: 459720 - DNA, 343 bp, Sorghum bicolor
ttttgtttaaaacatcgataggatcgcatgccagaagaaaatggctcatttgggtttatatacaaaggttggaaaaacatcaccgtttcaacacgtgtcttgctccaaagaatgcattgctccgctcatattgtgtacaaatctacctctttcttttcattcttattaggcgtggttggcatgccatgaacaggctacaccccactcaaacctcgagatcgataaatacaaaatcatagaggacatgggagtatgggaccctgccaaatgggaacaagtaaaacaatgacaacaccagaaatacagacattcggtggaattgatctcttttctttactttcac

SEQ ID NO: 459721 - DNA, 201 bp, Sorghum bicolor
cgtccgaaagacactgcaaacccttgcgccgccgccgcctcacaggtaaggccgagatggtttccggctccggcgtgtgcagcgaagcgcatcgtggtgggcgcgcgccaccacatgctaagacgcggggcgccgattataatcaaagagctggtggatgttctttttgttttctgcgtccgctaaaaggagatctgcatg

SEQ ID NO: 459722 - DNA, 231 bp, Sorghum bicolor
cgcgcgctcgcgctcgtcgcccaacaccctccgccgccgccaccgggcgtgggttgcctaacatccctgccggccacttggcggcgtgccacgatcagtgcagataggcgatccatgcggactcaacagacccgcagctcctaagcattctttgcagacgtagactactttttcatctatccggcgggtactttttcttgcctccaaccatcaaccctacgttaatcgcgc

SEQ ID NO: 459723 - DNA, 370 bp, Sorghum bicolor
  unsure (1)..(370): unsure at all n locations
tcgacccacgcgtccgaacaaaagcagtctgtgtagaacatattgaactgcggaatgagctactcacattgcttaacctacaaaagcagctgcaaagtaaagaggctgaagtttcagctaaccgggaaaattccttcacagaagcaccaagtacacctaagcgttctaatagggacattgatcgtcccttcaaccctgatgcaattgggtttacaggtgaaagagctggcaaacgggaccacaagcggaagaccactggaagatttatagatgcgcctncatcaccaccccagtccaagcggcctagaaaatngaagggatctgactgataattctgttcaaagagcaggggcgaaaatctgtagtaaac

SEQ ID NO: 459724 - DNA, 108 bp, Sorghum bicolor
cgtccgcccacgcgtccggaaagtattagccgagaaccctggtcttccatgcttctgcttcggccattcgactggtggaggtatcattctgaaggctgcgcttgatcc

SEQ ID NO: 459725 - DNA, 226 bp, Sorghum bicolor
tcgaccacgcgtccggtaacccgggccgcccacactgacgagatggcgactctacacggcggagggcagcatgtacgacactgctacacccggaggacggggtgcagatgaagctactccgcacgacagtctatacacggcagcaccgataggtaggccggtcccacacactgctgctcaaggggggtcgggccgaggaaccgcgctacactatgacagactccgg

SEQ ID NO: 459726 - DNA, 425 bp, Sorghum bicolor
cgtccggccgccgcgcagtggcgcccctcgctcggggacatctacgaggagtacagcaccgacgcggccaagtccgccgcgcgcgccgccgccgggccggcgagggtcaggaaggcggcgtcctgggacgtcgctcgggtgctgccccgcgcgcgcagcgatgaatacaggcaccttgagagcgcgtcgtccatgccagcgttcgcgccgacggcgtacctgttctgatcatggcgtcggcatcggcggcagctaccagtcgtcgtcgacgacgacgatgacgatgaagacaagaatcaaccaaaactactgtgggaagcatatatacagattactatcaacgtattgttgaaccaaagatctatatgcatccttcggaccgggataaagctaccttttttcatcttcgtgagagatagcgcgcg

SEQ ID NO: 459727 - DNA, 62 bp, Sorghum bicolor
  unsure (1)..(62): unsure at all n locations
cgtnccggaaggacatgatgagatctactcacctactgcaggaggacatgtggagacaacat

SEQ ID NO: 459728 - DNA, 309 bp, Sorghum bicolor
cgtccgggtgagcttaacactttcattgtatacaatgaacggaaaagagtcacttcatcagctaaaaggaagctgaaatcagaagacagatcattgcaccagactccagagggttcactccttgacattatgcgtaatgctcatgacctcctttctagttgcagcatagatattcccatggttaaagacaacagcgagtatttgcattctggaccgccatttctcatatttcttcatcctgctttaagcccattttgggatatcatacgacaaaagttcgtaggtggctctatttctaaaggttcagag

SEQ ID NO: 459729 - DNA, 382 bp, Sorghum bicolor
  unsure (1)..(382): unsure at all n locations
cgtccgaaaacaatcacaatgacctcacacgtcaacaggtcgctgccttttctcatcgccccgtcggaggccacgcccgccggcgccctccccctcaccgccatggacagagctcttgcttcccttcctatgacagcgctgttcgtcttcgagaaccccatcgatcagccagccgaaaccatagcgagagctctgtcccgtgcgcttgttccctactacccaatggccggccgcctcaccatcaccggcgaccagctgaaaatcgcgtgcaccggcgnagggcgtcgcgttcgctggcgcgtccgcgagctgcaccctgcaggaggccgggctctccggnccgcgtccgggatcaccgtcgaggacctcactatgaactacg

SEQ ID NO: 459730 - DNA, 237 bp, Sorghum bicolor
cgtccggagcgatgtgccacctgcagacagtcaaggagactgtgtaggagacttgtactaattatccaatacatgctcacaggaaacgcacataaacagcactaagaagctcatgcatgggacctgcaccatatgtgcatggaagtataatctatctaacagatggctcccgccctcatgaaggcgcgcggcgggtgtcaatcctacagaatctgatataagctgggcgcctcctat

SEQ ID NO: 459731 - DNA, 323 bp, Sorghum bicolor
cgtccggagaactttgagaaggctaaggacactggtaatatctcagcaacttacaacaccgggcacaatcacttcgagagttcattatttgcacgagcagaccttatcaggttaaagtcatcgactctcaatgcaaattctggacatgatacttcacctatatcactcgttcaactggactctatactgaacgcacgagactccacgctatttttgcccgtacatctatcaaagcagcaccaaacatatgtatggatatgatcgcaagaatatactgcactccctatgcccaactatgtgatcaaagcatagacaatggatgc

SEQ ID NO: 459732 - DNA, 278 bp, Sorghum bicolor
  unsure (1)..(278): unsure at all n locations
cgtccgggagcctggaggggatatatatatatatatgtagctgaaggccttcagcaaatcattgttgtatacttgtgtgttagtgattagcattgcatactccctgattgtaccatggtatattgaatgtttatactgctgaaaaaaaaaggaccttgtgatggtcagatgtttaatttattttttgacagtcttgttttgtgttaatccctaatgttcgtcnaaaaaaaaaaaaaaaaaaaaaaaaaaaaaaaaaaaaataaaanaaaaaaaataaa

SEQ ID NO: 459733 - DNA, 105 bp, Sorghum bicolor
ttttctgtagtcaagggtccaggaactgcaatgatagatatttacatcatcactcgggcatgtcgatttccttttctgaaaactctcctggctcgaactcgtgat

SEQ ID NO: 459734 - DNA, 108 bp, Sorghum bicolor
  unsure (1)..(108): unsure at all n locations
tcgtcctttgtcagttcgctcctgcgccgctcatcgncacgcgtgcctacctctcaccccaggagggattcaagcgaggcataactcgtgttgacaagttctcaaaga

SEQ ID NO: 459735 - DNA, 455 bp, Sorghum bicolor
cgtccgctcacagcagatctccttctgggtccaggtctcggtccccacatgattgggcacctaggaacagaagcaagatcatggcaaatgtaggttcaactttaaggaggcatagtagatctccaccgaatcacatggctaaaggtagaattgtgagaatggcttcacctcagagacaacctggatatgatgatcgagctatgcgttacagtccactatcaagaaacaacacttactcccagcatgcttcaacatgggttgagggaaggaacggttcagcagtagatatttctgatgatcataataaaagatattcaaggagaagcccacctctgagaattacctcacggaatgacagatttgatgtaatggactcccaaggacgaccacggtctggagaattctaccgtccaacacaaggaagacttctttatggttatgatagggaaaataag

SEQ ID NO: 459736 - DNA, 365 bp, Sorghum bicolor
cgtccgcctccgccaggcatgggccgcgggcgacggcaagggggaggaggaggaggcggaggaggatgttgtggtggcggaggtgaggcggaaggtggacgaggacgcgcacgtcatgatgggccgggacgtcttcgtgctctgggtgcgcgctggcttcgacgccgccttcgccatggggatcgtgctcgtgctcgaccggatcaccggggacgacgtcgacggcgacctgggagaggaactccttgaggccgtcacctcgtcggcgtaagcacgcgggatcggctttccgctcgtgggatcctcgtgatgtagtaaaatccacaaacagtttttctgatggttcttcttcgtcggcagagttt

SEQ ID NO: 459737 - DNA, 231 bp, Sorghum bicolor
gtcacaagcatccacgaaacccgcgcacgtctcagcgaagagaagtgtttttattcctcaatacaaaattacaaatgcattgtaacaacagtctatgtacagttgcaggctacaggcctacttacaccaccgaaagaatcgccaccgtcaccatcaccatcacgacactgccaccgcgttctgcccggcctccagttcttgttccgacaccgccacaacgttctggtcgat

SEQ ID NO: 459738 - DNA, 295 bp, Sorghum bicolor
cgtccggccgagtggcactgtaatccgcctcgtgacagtggaccaacgtcgtcttggggctacatcaagaaatggctgcagcgcgcgtggtcagcttcctggctcgcaagctagacgctggtgaggcacatcaccgaggtgcgccgcacgacgatcgccttgcgctcatgaacggccgcttactggcagatcagtttaccttgcattacatgttctgcgtagctcgacggcacactgtcacgagactctgagtttgattactggagccttttatctgacccggaaagcctgctgt

SEQ ID NO: 459739 - DNA, 206 bp, Sorghum bicolor
cgtccggaagattcctctcctccccacgcgctgcctctgctccgctcatggcgtccgcgccgagcaccacggcgcacaccctcgcgccctggtgaccgcacgccggtttcctcggccccccgcggggcccgccttccggccgtgttccgcctctcgtgcgctcagcccgggccggccggatgccgcgcggtgttaggtcggctcgt

SEQ ID NO: 459740 - DNA, 412 bp, Sorghum bicolor
cgtccgtcgacccatgcgttcgactacgaggagctgatcgagcgagtcgagctggagaggctcgagcgggttagcagctacgagtaccacggagacgacgcgcccataatccatgactcccaccttaaggagcttgaggcattaaacgacaatcatgatgtaaagcaccatgacaatgagtgggaggactacatttgacatcagcatgatgcacaggatcactctaatgcacctggacagtgttatagcaacattgcgtgctagctcgctattgatgatgtaaaggccatacatcgggcgtgggcacctactactggaacacattgaggatatatacaggatgaaggggacactgtctgtatgtgggaagtcacagacacccggacctgagcagtgcatgtcgttgagaagg

SEQ ID NO: 459741 - DNA, 372 bp, Sorghum bicolor
cgtccgtgaagtaacagaggacctaacgtgtctgaagctctcatcttcagaaaccgacgaccaccggaacaaggtctacttatgcgagctcacagatcttgcttacgggctggtccgaatgacaaaacagagctcgcatggaaatgcgatggttcccttggctaagctcgtggacaaactcgcggcctactacggacttatcgcaaacgaactgccacagatcacgttgctgacaaacaaggtctcttcaaagtacaaactggcgagggtctacttagactactacacaacacgattgtcgacaaatgtcattctcgtagtcgacatggcggagctcgtatcgtcttacaccatccatggtcacaaggtgct

SEQ ID NO: 459742 - DNA, 486 bp, Sorghum bicolor
cgtgcggtgtgcataaaccacaaatgaggaccaatggaagaagaatgaaggctgcagtaagaactaatgctagatggttgtttggaggagatggacgtagcaatgatgctaggctggagcgcaccgagtctgctaatgaagatatcttgatcttctacttccagatggatctacagacccggatacaatatgcattgaatatagaacaatttgatgtggcaaagcaattgagggaaaaactaactgagattgaaacagagattattaggcagcgtgaagctaaatccgggattttgtggacagggagtgattacggaactgtaaatcttgatccgtgtgcctgctgacctgcagatagcttttgacagtggaaactatgcttaaggaactaatctctctgacgacattgtcaaactagaagcctagtctcttggcagctcatgctaagctgttgcttaataaaacgtgcaatatgcattttcatta

SEQ ID NO: 459743 - DNA, 282 bp, Sorghum bicolor
ccgaattcccggtcgaccacgcgtccgcgctgaacatgctgacccatctacctgatcgggccgttggcgaccgcgtgcgtctgcaccgggaatcccacgaaggcgactatggggaggcgcgcgtgctcgatctacgccagctgtaatcgcttcatctgataccaatcggacgccacgccgatcgtgtctaactaggagccatctgagaacagcctattctacaggtcagagctacgcgttgctctggaactacatgaagacgatcaccaacacctaaatcca

SEQ ID NO: 459744 - DNA, 446 bp, Sorghum bicolor
cgtccgtttgagccaatgcgccgagcttctgctaggaggacaccccctgttgatagatcagatccaggggatgaaactgggggaggtatggttttgcttttgggtccagcaccagatggtagatcaaattccccccgtcactgatctttctgggtggtgagaccgtgcgtgaggaatggagaaaggaagcagaccgtgctgctgccttgtaattatataagttgcttcgagtattatgtaatgttattaggatctagggacctagtatccattctcaaataagtaaatactatgttgttgtttatgcttgtatagtactagtgactcccaattatgttattatgatgctttaatagttacagatgtgttgtgtcagacgttgagtaaacggtgtgaatactaaacatttcatctaccaaatctcagtagcacaacatttctatttc

SEQ ID NO: 459745 - DNA, 448 bp, Sorghum bicolor
cgtccgctagctagttaaaaattaggtaatttttttgcttaaaatatatacaagattagctctttagtgaaggataatagatgtgtcaatgttttagtcaatctttaactctttattaactagaatattagccaactagctatattcaaccgtagctggtttgagctagctttggtagggctcctctctggcttggctcctcaaaaggagctctgccaaactttttttagaaaagctatttttttagtaaatagcaaagaaatcagagccattttgactaagccacaaattataacttcttcaaaacggctctagctctttagaggagcctctcgtgagaagtcgtgtcaaacatctccttagtactccctccatctcaacaaattgtaagtcattccaataatcttgaacagtcaaatttttctaagttgaccaaattatatgataa

SEQ ID NO: 459746 - DNA, 197 bp, Sorghum bicolor
gtggggaaaaaccccccctttttctttttaaaaaaagtgtggctcccccccattgaaaagttttattggggttcagggggtttattctttcttttttaaaatttttataaacccaatgtggtttttacttattaaatttggacctaccaaccccctgggggaaaaaataactcccctcatctttttacttttaaaaa

SEQ ID NO: 459747 - DNA, 342 bp, Sorghum bicolor
cgtccgcgagaacgttgccaggaacagctggatagtgatgctgagcacggatgtgaggaagatgtctgcatccttgctcaagtgcgctgacttatcaaccggctgtacaccatacgatgtactatccaagagtatagcctcaggcgtggatgtggactctatgatctgatgcgttggacataagggtgcagcaaggagcactgccttgctgctgatgactggtcatcgccgaagattggatggctcgagctgaagccataagcacctgggcatgacacatgccgagctgcttctcctactgaaactggatctgtacatggcatccctggcatacatgatgac

SEQ ID NO: 459748 - DNA, 361 bp, Sorghum bicolor
cgtccgatcaggcagaacggtgcatgtaatcgagctaaatggccacttaaacagatacattaggccattgtgtagtgtttaaacaggctaaattgccatttaggaaaaaaaggattggagtttgaactttgaagtaattactgataaatgcatgtgactgctagcacattgccttctacttgaactgaaagaggcaacaaagttctaagaaccatcaccgcgtgagtgcttgaccccctaacctatttgcactttctttgtgttacacggcatatctgtaggtattggtggtgaccatgcctatgcacgtttttcattaacaggggcatatatgtaggtatgaatatagattgtctagaat

SEQ ID NO: 459749 - DNA, 461 bp, Sorghum bicolor
cgtccggtaagaatcgcgaagggcatttatcttatacacggttgcgtaaccactggtgatatgagatgatctctattcgctcgggaagtcgagatcggttaaatatcaggcctgaatggcgaaaccttaaatcaagtcttaggatgctgtgtgaaagaagcattgctggactcctcgaagagatgtctgatcaaagaatcgatggactgaaaatcacttatggatagaagcgcttattaactaaagattttgaagatgaagctgatgtccgctgacagagaatggtgtggacaacgcggtacatacgttgcatatggatgctgtcttcagattgactggagttctctggatggatgcctatcgagtggtctaatgcctctctcagctcactgggcagatgattagtgctatctgtgactgttgggtaatcagattgtcgagattttactggttggagctgt

SEQ ID NO: 459750 - DNA, 348 bp, Sorghum bicolor
cgtccggaaagcttgggctgcccttcatctacagtttggtcaggtatcaaggcctcagtcatcagcatcttatgatgtgggtggcaattcaggtgtgggggtatactttggttacctgagaaccgtgctgtcttatgctaatccactctcctacctgaggggaaataccaactcatcaaatccagagctacagtcaaatgaaggacatggatctggtccatggagtgagccacggcctcttgttggcaatagaggccatgaagtgactgatgcaaactctgcaaacatgctgcgaaggcgctccagaccattcggtgccaatatccacaccttggggaacgaggatca

SEQ ID NO: 459751 - DNA, 298 bp, Sorghum bicolor
  unsure (1)..(298): unsure at all n locations
cgtccgcccacgcgtccgcggctgtgagatacccaccagagtggggaaccaagacgagacagtaggagagctatgttctttgctccagtgcacgactgcgtccagcttgatgttgaagttttgatcttgttcgttgtgatgttatatgaagatgcgggagtctagcttgataccgtgctgttacttgatcgtgaacttctttcactgcgttattacaaataatgtacaatatggttctagtctcaaaanaaaaaataaaaataaaaatttattataattattatatatatattattgg

SEQ ID NO: 459752 - DNA, 180 bp, Sorghum bicolor
cgtccgaccacatagtctgcacgatggtgatccatatccgagaactgtcaaggaaagggaaggcgtccaatctgaccgacacgtttggctggggcgcattcatgctcgaggtggtatgtctccagataccctcttagctgaacatgtacaccagacggctaatgctttataactggttgc

SEQ ID NO: 459753 - DNA, 381 bp, Sorghum bicolor
cgtccgggcgcagccagagcgacggcaaggagaagttcgtcttcttcagcgccgcctcctccggcgggtcgttcgggcgccggaaccagaaggggcgaggtgccgtggagggtgccaacggcgctgccagcgccggctccgccggagctggtgctgcccacgcctggagctactacgtcaagaacaataacggcggtggcgcacgccggaggtcgttcctgccgtacaagcaggacctcgtcgggctgttcgccaacgccgccgtgttccgccggagctacctcccgttctgatatacacacccagccgcatatacgtatacactcacccagctcacatatactagctggtacgtatatgtgagcgattggtaactttttg

SEQ ID NO: 459754 - DNA, 138 bp, Sorghum bicolor
aacctcgctctattccacacgaacgaacggtccgtacgtcacatcgttagctggttggcaatggcctccttttcgtgggccagcgataaccgccctttccgccttcgccgcgccggccgcccgcgcctgggccagaag

SEQ ID NO: 459755 - DNA, 396 bp, Sorghum bicolor
  unsure (1)..(396): unsure at all n locations
ggtcgacccacgcgtccgatttcatgtatcgctcgttgaagcaaaaactgcagagtaacatgaggcgtgctctctgtcacaagatcccgtgctgtggtaggacgaccgccgggccccggattttatctacgccctggattccagcgatttggccggggtcagtcgctactggaataaactttccatctcaaaaagacccatcttattatcataggaagtctgccaatttttccaccaaggtcacaccatcgtcacctccctccacggccatggagcccggcgcagacgaggtggcgttcgagtcctcggcgcatttccgcatctacaagagcgggaggatcgagcgcctgaaccggcctnctgtcctccccgccggcctcgacgatgccaccggtg

SEQ ID NO: 459756 - DNA, 426 bp, Sorghum bicolor
cgtccgctccacaacttcttccgcttcaccttcaactcatcatcaatccggacaaattccaaggagctcgcgggggcgattcacgacggaaccctatccctaccgcctccgcactctcatggcggcgacagccgtggcagcaagtcggaagaagcgagggacggccgccgccttcctcgatgaccccttctcgttccccgccgccgacctgccgctcctgcagaccaagcgcggccggtgctcgtcgtcgattgtcgccgcggacctcggcctcagcttcccgctcgagttcgaccccgtcgaggcgctccatctcatctttcccggcgaggatccgcaggtcctacaaaactatttacaagcgtcaggaaatgtgctggatgctgcaatcagggcatacaaagattatttggcagaaagaaacac

SEQ ID NO: 459757 - DNA, 109 bp, Sorghum bicolor
cgtccgaaagaaaaaaaaaataaaaaataaaaaaaaaaaaaaaaaaaaaaaaaaaaaagaaaaaaaaaaaaaaaaaaaaaaaaaaaaaaaaaaaaagggaaaaggaagg

SEQ ID NO: 459758 - DNA, 494 bp, Sorghum bicolor
cgtccgtggctcgtcacgaccatgatttggtaacgaaagcagcaggaagccggcggtgtaggcgacccatggcgccacagacgaggagagagaaggcggcggcgaagccgagctcgtcggcgccgacgctggcggggccgggggcggtcgaggtgcagcgccggcgggtgggcggcggttggacgagccgtcggatctccatctacgcctcccgagtcttcttcctcctcatcatgctccagatcccgctgttcagggtcccttgtagagcaggcacatgcacaactcctattcaagtcacatcgtctcagttggtctcaaatgagatattcccaccagctgttgtgaaggccatgctctaccctggagctatcgtgagcagcctaactaaaagcaagacatttccgagttggagtgacctgtttgacatgtacaacctgacagaagccaaaaatgcttctgcagtaattgatcttcagcgtctagagatactt

SEQ ID NO: 459759 - DNA, 501 bp, Sorghum bicolor
cgtccgctggccccacgaggagctgctgtcgagccgatggaagagggctccaagttcgtgccgctgaatgccgaggatcccatgtgcgggccgagcggcgctattgcttattggattcgagaaaggcgaaactgtcaccattcaggccttcttgaaagagcttgaaggtgaattcctcaaggtgattcattgtacagaggagatgacgaagcaaaccttatgggatgccatgcacactgagcagcctgatttggaagctgtcaagattgcaagatcactgcccaggatatgcatattttctggtctgactggtgaggagatgatgatgttcatcaatggcttgccagaaactggattggaatctcctgcttttgctgcgcttgttcctaacagtgcagaaaaaggtctcggccaggtgatcgaggaaataatgggcgaccatgagatgctgcacgaaaggattccaaataagaagaatctgtagttaaatttaagcagaat

SEQ ID NO: 459760 - DNA, 387 bp, Sorghum bicolor
ttccggtcgacccacgcgtccgcttttttttttttttttaggagcagtaccaaagtaatatgtttttttttttcattatagatacaaagatacatttacccaaagtggcgtatggtacaacagtttcagcaaatctgacaagcagagttactgaactaggcaatctgttcgagaattttggaatcagatcattactggtacaaagttggcatcccttaaaatacatttacatcacctgagccaatgaatgtcagaattgtgcagcaatagcatacaagcttcggaagagagcactgaggcaagcaaatatttaccttttgtttttttaagtctccatttacagagcatttttttttccttcaggcgcccaatatacttcggtatgaa

SEQ ID NO: 459761 - DNA, 529 bp, Sorghum bicolor
cggtcgaccacgcgtccgtacgcctgcggttccggccagctcacctgtcgctgaagctggccttcaccctctccctcgccgtctccttctccgtctcctgctgcgcgctcctcctcctcttcctcgccccgcacatcagccagctccccggagggcgtagccgcggacctcctctccgtgctcggcggcccgcgcgctgcggcgcgggtgccggcggcggaggcctcgcggctccgcgcctgcctccggttcctcgccccggccaaccccaccacggccccaaaggtctcgtcttggagccgcggaggccctcggaagttccttctggaacgttgcgatgcggggacggcggaggcggacgagatggtgatgtggccgccggccccggtcttggagctggcccggctggccgtcgacttcggaggcgatcccggggccatccaccgggcgctcgacccaacgatgctgccggtgccagatgttgagggcgcccagaagaattaatgcgaactcacaagaacaccatttg

SEQ ID NO: 459762 - DNA, 249 bp, Sorghum bicolor
cgtccgcgccgcccttatttttctacccctatattgatacccacaggctgaaacacatctacgaacatcacacaactccagaccatcgatgccgcgggaggttatactgcatcgactgttcctcttctctgacaagcacgaattctaaattacacctacttcacaaacaccagcggctgcccacactaacataatctatttcgaaaactacaatacatctataactcatgccaaccgaccgatgctaac

SEQ ID NO: 459763 - DNA, 501 bp, Sorghum bicolor
cgtccggttggaaacattgctgatctgttgggaactggaatgagcattctaatctctaaaagcaatccatcactggtaacttcttttgccgtcttgtcgtgcggatatcttctcagttcatattatgaggtgagatctgttgtactgaataccctgaatagggcaaggttcactgtggctgtggattctttcatcaggactgggtatgtaccctcactgaaggatggaaactcacaagagacaatatttaatccaccttggcgacatgagccagtcgcaataggatcaagatttggggaggcgtttcaagaacctgcttcgtttattgctataaaacctttgttcgaggatgagaggtatattgttacatataatccgacaaaggacaaggtatatgctttgctcaaggaccaagcaaagccagatgacattctcaaagctgctttccatgcacatgtgttactgcattttatcaatgcttcacatgctaacctgaatgca

SEQ ID NO: 459764 - DNA, 481 bp, Sorghum bicolor
cgtccggcacagtatagcttcaaagaatgtagactactgacttttacagtctagggcaccctatgacctaagatactagcatgtccgggggctcacacatactaaatcaacgtgagaggaaccgaatcttattcactgatctggataacttatggcaggatccctatcgtagctcatgatgcatatctgttgacagctgaattgcacaagccttgcatatcatagcatgcaaggactgagctctacttgttcactgtgggacgttatataacgggtgatgatacaaacaatcatacagcatttgaaagatgacatgaggtttgatcacccaatgtgctttatgtcgatattcctttgagaccttccagatgagttttggtctgagcacgatattctgtaatgttaaccaagaatcccctgtatttgatacctgcacgtctaacaaagcattatatgtttatcatacagccaacatgactgg

SEQ ID NO: 459765 - DNA, 555 bp, Sorghum bicolor
cgtccgcacgaagaacattcagtcttttgtttcctcgtttttttatttttatgggtatagctattttaaaagactctacttagagaagagtggagcaaagtctattggaacatctgccaacttgttagttgcagctgctgctggtgcttgcactgttatcgttacacagccattagatacagcagcttctaggatgcagacaagtgcctttggaaagtctaaagggctgagggaaactctttcagaaggcacttggatggaagcattcgatggcttgggcatttccatcatattgacttgcaatccttctattcagtacaccgtatttgatcagctcaagcaaaggataattcagaggcagcgacgcaaaaatgcaggatcagcagaggataattcccgagttgctctttctgctttctcagcttttctgcttggtgccgtctccaaaagtattgctacagtattaacttatccattaatcaggtgcaaggtgatgattcaggctgcagacccagatgaagatgatgacaatgaatctgaaaggccaagcaaatt

SEQ ID NO: 459766 - DNA, 329 bp, Sorghum bicolor
cgtccggagatggaattcctcactttggacggtggcaacaacgaggcctggacctggacggagacgatggaagattcggtgttcactttgggcagtggcgacgacgacgaggcctggacagagacgagggaagatccgccgcgccctctgctgagatggcagactggtgtgacactgaaagggttcattttctggcgtgttgacacggctcagtactgtcagtcaagtgcggggattcttctccgccttaccctagagcttgagggattcaatatcatccccctgccggggtcaatgcgcgtttgtgatgacttcatgttggatgcact

SEQ ID NO: 459767 - DNA, 539 bp, Sorghum bicolor
cgtccggagcccgaaaaacctatcatcaagaacttcattactcagactggtgttctcaaagggctgcagcaatgtaaaggaagggactggtttgactacatttctgcacttcctctttcagacttaggacttccatttatgtccattgatgaggttattttgtctccctcttaatgctgtttcagttgaattccacccttttaatggaagagccagtttcctatgttctatgatattcttttaatttacttgtgcagcctgcaaagcactacattataatgtgtttgcctcttcaacagacactggtaaatgttgatatgacaattttgtgttttttcaggttatcaccgtcaacagtgatgatctaatcttagaagctttcaagtgcatgaaggataacaagattggtggtgtaccagtagtagaaggccccaaaagaaaacttgttggcagtgtttgcataagggaccatcgctttctgttgcttagacccaatttattttcaaatttcaagcaacttacggtcattgaattcatga

SEQ ID NO: 459768 - DNA, 457 bp, Sorghum bicolor
cgtccgatccctgctctcagccgtcacatacagagacagaaaaatggaggagctcaggggcatcgcccggccgacagatgcggaggtctcggctcggtggcgctcggtgacccgtggccccagcgcgcgagcggcaggcggccccgcggcttcggagagctccgtgccccggacgcgcacggtgagtcgatgcgccaggcggcgtcgctcctcgccgacaacgaccctccgacgacgccacgccgcgccgccccaccactttcctcaacgtcgtcgccctcggcaacatcgtgactatcgggcgctggcaagttgggcgtgctgaacagcctcatcgggcacccgatcctgatccctcattaaagctgatagatttatctgggatagatcagcgagcttgtgatgattccatgtaatatccacaatgaactttcatcggagtgaaagacaagctcta

SEQ ID NO: 459769 - DNA, 510 bp, Sorghum bicolor
cgtccgggttcagaccaatgacttatcgtggcatagtaacaacagagatgagaccgatacttgcagccagtcaatgtccaattcatactatacatcttcttttgcgcaatcttatggtcttcatggtgttttgggcaagccagattggtttctcaatttcagctactcagagtctcatctagcagaggaatttcagcatgaggtggcgttgtcctacaataatgagtgcaagatatctgatcaacctattcattggtatcaccatcactgctatatacaatcactagatgtccaggtcaaacccccggaaccagtttcttctgagaggttgaagtactatgagcatttttcaacatatggcgaccaaagtgatatccacattttggaaactccaacacatgcccacaacattcaatcctatacaaggacatttgatctaccacttgaaccttttaagccatcatattctgagaattggggattttatgatgcctatacacaagggaatgc

SEQ ID NO: 459770 - DNA, 433 bp, Sorghum bicolor
cgtccgaaatatggccatggatgaaaataatcaaataaatgctgcagcacacaacactgaaggccctgctaagactggaagaaaagttacaattaaccatcaacttcgtaagagaagagcaaaaggaaagcatattgatataaagttccctaaagaatttgcaaaagtgtgtggagaacatgctagtttatttaaaagtgagatcacagttcttgtaagaactataccactgcaagtgaagaagtggagggacatggataaggttcatgctggtactactgcagctgtttggagaaaactaaagcaaaagtttcctgagctttctgaagaagataaagattgtgccatgaggcaagtagagagtcaatataataatcggcgttaccgtttgcttcaagcttaccgaaacaacaagccaaggccacaacatgtc

SEQ ID NO: 459771 - DNA, 309 bp, Sorghum bicolor
cgtccgcgggcgcgtgttcggacgcgtgggctatctatcagcaaagcacctacaccaacaaaaaagcaaggctcgatggcggcctgcatgatgcgcgccgtcagctctaagggcaccgccgtccagggcacaagcaactgccgttcctcaggacgccgtgcattataatgaggagccgtatgcgggacccgcaacgaagatcaagactcgacaagcccgtatcgaatggacgtggacagaccgtcgatcaggatgcctgacggaggaaggtcaagggcaagggcttgtaccatactcctcgacaagacc

SEQ ID NO: 459772 - DNA, 366 bp, Sorghum bicolor
acgcgtccggcacgcctgcgcccgacaacagcacacactgtaagactaaactgggctactcgatacagggcagggacagcaggcatgcctgaacgggcatctggatgttttttagagactgatggtcggataacaagccacgaggaggaccaggctaatgactgggtctacaccattgactgaagtcacacgcacgatcacacagtgcgcgaagcaattgtctgagacgtgtaagaactcgtgcctcatctgcaggaaagaccccaccagcgtcaacagaatacactgatgatgaactggaatgaagggggccagttacttatttgcttggacaaaggaccacctgaaaaaacaacatctatgggg

SEQ ID NO: 459773 - DNA, 306 bp, Sorghum bicolor
tcccggtcacccacgcgtccggctgtcaaagcatacacagaggctgctaccccaactctacagaaagaacatgcatgagctggtaaaccccacacaacccattggtgcagcctgcgatcaaaatactagttaaggcgcgtgtccaacaagtctcttctgtgctcacggccgaagcagctgttgacgttctatcagctcaactcttgcatctcctacaagcacagaaatattatgttcttataaattgccagcaactgatgcaagaggcatttccattcgcacgaatcacagatcctcaaaattgac

SEQ ID NO: 459774 - DNA, 432 bp, Sorghum bicolor
  unsure (1)..(432): unsure at all n locations
ccggtcgcccacgcgtccggccagaggtgacaataaggaactccaagaccatcgtactactggtaataattacagcacaccgtcaccggtcctaataccccttgttgcaacagaagaagatgagaagaacatagtagtaggctacccaaaaaaaaaactgcgagagcaacaccaagaggttaacagcagtttaaggcattgcaacatttntcagtagcaggagtagcagtagtagcagtctagaggtgcagcgaggtgtcgacgtcgacttcaccagagacatgtttgtagttgtaggtcttactgggccacagctccaccgcaatggggtcgctatcgccgtggagctggaagcttttgcattcacagacagtggttggcacggccgggaataaggaggcttggggtgcaacagctgcagtggtttcccgc

SEQ ID NO: 459775 - DNA, 526 bp, Sorghum bicolor
cgtccgccccgccgctgctccagctggtggttctccaacggcaacgcccatggaagagacacagacaccaccaccaccaccacgatcagcagggcgacgacgaggaggtggtggtccgaccccgacggcagccacccttcctcttctctagaggaggacgactacgattacgattacgaggatgaggctgcgttctccggatttggctggaccggggagatattcgacgaagtcctggttctccaaagtatctaaaacgtacgggttccgtctaacagggatgcttacgttcatgtttgctggaacggggcttaagggctttttaatggccatggggatcccgctcaagcaggcgggcatattatctttgcttaagagaaaaggcaaccgcgacgactggtgggggcttttcttcaaaaaaaggtacatgtgggggaggagaccattccaagggcaagaacaccccgatgacaccactgactttgcgactggtggtcgacgcaatggatacagcaagagcagcagc

SEQ ID NO: 459776 - DNA, 59 bp, Sorghum bicolor
cgtccggatgaacgaattacatgacaaggagctgagcgcaccgacaatggtgtcctctg

SEQ ID NO: 459777 - DNA, 224 bp, Sorghum bicolor
tccccggtcgacccacgcgtccgatggcgcatgtatacactgtgctatcaccgctgagtaccgctatgccttcgttaaggagtacctattacgccagtacttgagatcggaggcacctgagactgaatacggtcagatgaacatgtggaggacgccatccactacgtagtcgcgctgtggtatgaacaatctgcgtgccatcatctgaatcttgtagtggacac

SEQ ID NO: 459778 - DNA, 468 bp, Sorghum bicolor
cgtccgcaagcgccaccggccaccggcctccccctcggttgtcagattctggagcagccgacctcactcgtgcggtcgattcgggatcccctgcacggacgccaccgccggatgctcctccccgcacgggcgccgccactggctgctcctcaccgcgtgcacccccggcgccgctgcctgctgagctcttctcctcagcgccctccttctccttttgcaccgcctgggtgcacaagccaaaaaagcactgggggcatggacacatggacatggtagttctcttctcaatgcacaattcacacctctcacctcttcgttcggccaagaacttctctcgccttttcatgcataattctttctacctggatgagaatttgaagcggttccgtctggatttccacatgggcctaattaggttctggtttttttcaagggaggatttcctatgatattcatcttcggagaagc

SEQ ID NO: 459779 - DNA, 178 bp, Sorghum bicolor
tggctccttcttgacatagcgccttcgctcgcggccggcgccggccgggcagaggcgtcttaccggcgcgcctttcggaaggccgcggacggccgcgtggcgtggccgcagcgcccttcttgccggcggcgccatggcccaagaggtgctgctgggcgcaaacggaggcgtgctcgtc

SEQ ID NO: 459780 - DNA, 218 bp, Sorghum bicolor
  unsure (1)..(218): unsure at all n locations
cgtccgagagcgcgcctcggcgacgtggtacgtaccagggcatacgctactcatgctagccacagacgctggccgtgcggggctcgacctgcgcgcccnggacgatcctgtgaggccgactttactccccggcaggcaccttcccggggagactaacagcagtcatgacaccaagcctcgctctgatagctaagggcctcaataagaccccgacagcc

SEQ ID NO: 459781 - DNA, 302 bp, Sorghum bicolor
aaatggcggcaaggtcatccatgctcgtcgttgttgcatttaattttatttttgccgttaatgcgacgaacttctcggatcgaagaaacttgcgtgccaccatgacccggaccacaaccggccatcaagcttgactcgggccttgcacaagtacgaccaactgctgtacatgctcgacgcccggtttgacgacgctgtctcatggagcgcgcagactgcgctccatctcgacagcagcggcggcgcatacgacatgacgttgtgcggggtgacgccagcgtatagaactgtaggttatcatc

SEQ ID NO: 459782 - DNA, 526 bp, Sorghum bicolor
  unsure (1)..(526): unsure at all n locations
cgtccggtaattagtgtttttgaacatccatacatattccatacgttgctaaacccctcttttagattcttctactatactgcaggtactggtggtgctggtccaacaatattggcaacaagttttctgcttcttggggaggatgtaattgcatataacaagggagaagaaatcaaattgaagccctatagtggagctctgaacattgatttcggaaagggggtcagaaagaaaaatgtctacttattgaatttgcctgaagtgaagagtgcttttaagatattaggtgtgccaactgttagtgctcgatttggtactgctcctttcttctggaattggggaatgcaggctttcgcaaactttttacctgttgagtttttgagggatagaaataaggttcagaagttnggtcagtctgttgatcctttggttcgagccgttgatggtattgcaagaaagcgtgtctctatgagagtagacttggactgttcaaatggccggaatactattggattatttactcata

SEQ ID NO: 459783 - DNA, 168 bp, Sorghum bicolor
cacgcgtccgtgatcataatacatggattcacactctgcatgctcagaaagagagataatgctgtctcagacacagctttacgcattgtagctagcatgaagagagattggatgcagactgggaggaagccaagggattggtgggcacatatacatgtgactcttatg

SEQ ID NO: 459784 - DNA, 349 bp, Sorghum bicolor
ccacgcgtgcgaaaaaaaaaaaaaaaaaaaaaaaaaaaaaaaaaaaaaaaaaaaaaaaaaaaaaatttaaaaaaaaaaaaaaaaaaaaaaaaaaagggagggaaaaataaaaaaaaggggggggggtttttaaaaaaaaaaaatttaatatataggtttagggggggtttatttttttttaatggggaataaaaaaaaaaaattgtgggggtgtttttttaaaaatatttatttttggaaaaaattgggggttagatatttaaaaagggtgggaaaaaataatattttagaaggtttgtaaattaaaaaaaaggtagaaattattttttttttaaaaatttttttatat

SEQ ID NO: 459785 - DNA, 344 bp, Sorghum bicolor
cgtccgcccacgcgtcactggacccgacctctaaaacgtcatgcatgcagctcccatctgtgctgcatcaagacaatcttagaggaaatcgggttcggatgaggatctgtgaagctgctggacatcaatcatctgctatacctggtagactgactaattgctgaatgtgaactcgtaggacaccgaagagagctcgtatgcttacacagtgaggctacaacatcgctccatacatgcgcgctctcatgcgactaatatcgatccagaagacgagaattgcatcatgtccatgctgcacgactgaagcactcacattctactcactatgcgaataacggctagaa

SEQ ID NO: 459786 - DNA, 375 bp, Sorghum bicolor
cgtccgcttccagaatggtataagttcactctttttaatgagctttactttctggtagctggggggaccgtttggacagatggtcaacccccagcaatcgatgagaaaaacagtcctggttctattcagcagaagtcctcaaagaggggcactaaagacactaaacagggatctgttaaagataaccatgtcaacctgacagtggagcaagtacctcatggtggtcaaatgactaatagtgatgatcacagtgtatcagttcgcagcagttcatgggtcacaaatgcaagaacaagtcaatggactcaagtcagaagagccaattccttacttgatctcaaaggatggccctgaacatgttggcaagtttttgta

SEQ ID NO: 459787 - DNA, 142 bp, Sorghum bicolor
cgtccgaacggttgctaataccccgttcgacgcggacgcggacacggcgctgagcgtggccaccgagatggtggcggagctggacataccgacacagtaccacatgcagagatcagccgggtgctgcgtgccaatcacggcg

SEQ ID NO: 459788 - DNA, 91 bp, Sorghum bicolor
aacaaagactaaggagagctccatttccttgcatgcatgtaaatggagctctccttagtcttttggggtcgggtttacatcggacgcgtgg

SEQ ID NO: 459789 - DNA, 112 bp, Sorghum bicolor
cgtccgatctcaagattctggatgatatacatacgcattctgacataatagaatgcaaaacctcaagattttccttatttttaatttttattttatcttaattacaacaaaa

SEQ ID NO: 459790 - DNA, 208 bp, Sorghum bicolor
cgtccggagagagagagagagagagagaggtgcccagggctgcctaccgtgagaccgatgaataagtgcccatcacagatggagctggaggacttactccatggacgataggacacaactgcggagacaacggctgcacgtgccgatcacaaacctgtacacgacgtttataggctgctgccggtctgaacaagtggtatgttatctc

SEQ ID NO: 459791 - DNA, 415 bp, Sorghum bicolor
cgtccggcgacaagttgtagcagaggaaatcgatcaggaagagatcgagaagatggggaggcagcagctttgcatggtgttcctgatggcgttcctcgtcgtctctaccatggacgttgtccacgtggccgcagggagagggctaggggaggggagctatggagccttgatccccggcggcacgccttccgtgcctcgtggccagccatacactggccgaacatgcacaaaaatctacgcgtgtaaaccgcctgctgctgctgacgctgacgccgccggcggagcgccatgacgacgatcagcatgcttctaataagaataataatttcctttgaaaaacaaggcgcctctagtctaggctctacataatcactagtagtaatcaggttagtatgagtctatataataatttaat

SEQ ID NO: 459792 - DNA, 154 bp, Sorghum bicolor
cgtccgcatctcttcctctctcttccttgacagcacgcgcaacgccagccaccgagccagagcccgccaccaaccaagcgcgatgggcaagaagaagagcggcaacgacgcgcccaagcccacggcgttcgtgctcaaaggtgccgatgcactg

SEQ ID NO: 459793 - DNA, 272 bp, Sorghum bicolor
cgtccgtgatgtccgccttccccgtccgcggctccacgtccagcagcagcatcgtcgccagcctcggcagcagccgcgcccccgcccccgcgccgtcctccgtccgccggcgccccagcctcatcaggaacgcccccgtcgtcgccgtccccgccaccctcgtgggcatggacgccgtcgagcgcttgaaggtcgggttccagaagttcaagaccgaggtctatgacaaaaagccagagctgttcgagcctctcaaggctggccaggccccc

SEQ ID NO: 459794 - DNA, 288 bp, Sorghum bicolor
accggccggattcccggtcgaccacgcgtccgagcgacgccgtcgtagccgccgccgaccacgcccgccgccagccctctccaccgggcgtcctccctctccaggttctcctccaccctcttcgacacgcgctccgagcacgcccgccgccacgcccaccgccagccccgtccccatctcccacttcttcaacccggagaggagactgcgctcggtcgagcaccatctgaggcccagcatcctcgcgagtcccggccagctccggcgcggagtccgccctctgcagca

SEQ ID NO: 459795 - DNA, 407 bp, Sorghum bicolor
cgtccgcagcgctggatacaaacacaaggcgaatgttcgaacctactatcagcaatttgaggagcagcaaactcaaagtttaattgatcaaagaggaaggagcatcttggacaagctgcagctttccaggcaggtgcccctttcaaccaacatatgctcacattcccaggagctgtggcccgtcctcgtattccaattctgccaacccctggcatgcctcatggattccctcaagcacctggtgccccattgatgccaggagttagacctccgattttaccagctccaggttatcctggtggtccaccaaccatgctgcaaccaggcgccccacctggctccatgccacaaccaggcgccccacctggctccatgccacaaccgggcgctccacctggttctatgcc

SEQ ID NO: 459796 - DNA, 522 bp, Sorghum bicolor
  unsure (1)..(522): unsure at all n locations
cccacgcgggcgcggggaggcggcagcacgcggtagatgctgctgctgtgaacacgactaccgacgtcgataacatatgggcggctgtcaccatggcgatgtgggttagccttaggccaggagcccggctctagcntcctcatcacttctgtggaatctggagggaatgcancatgagctggtctgaaagccggccaccaggtcttgtgcacaagtagcttctttggagatgagctgcggcctgcagataagcttgggttcaccaagacagccatccaagcaaagccagactccatctactttgtcgtgagcaggggtgccgaagttgatgtgaagcgcctacctaagaggccggcaccgcctctgtttgcacctaagttgactgatgcacaaaaggagagagcaacgcacatctgcctttattgcggattcatatactatctacgcaaggctttctaagatcaggccgatgaataataatgcccacaatgcaatgcgccaaagaagcgatttgcaaagtat

SEQ ID NO: 459797 - DNA, 378 bp, Sorghum bicolor
cgtccgccagagcaagaagtattttgctcggatgactacaaaagtaggcttttgtagggtaagagtgccattttcatcttttcggccagtaaacccacaagatcctcccctcgacccttttcttgtgcatacactaaccattaggtttgaaccaaaaaggcagagacctggtgatggatctcaaaatgctagcgatcctcgaaactttgagctaaaattggaatacatcaaagctttacctactggtcaagaaacagacttcatattggtgtcatgttcaggttctggaattgaatctaacagaagagaacaagttctcaaagccaagaaggctggagaagatgcacttgcggggtcaggccttggatatacaatcgt

SEQ ID NO: 459798 - DNA, 262 bp, Sorghum bicolor
ccgacctagacgagcgaagatacttacgcctccattccacatgatagttcatctatagtgtctcataacttcactgcaatcaccttcgtttgagagcggggtaacttagaaagcgctggaggtgcccatcttaatcgtattgccacacattgtgcttactttggatatcactattgatataccgatcatactgatcgtgattttctacagttacacagtctaaatggcgattggaacgcgaccttgaataacaacttaatta

SEQ ID NO: 459799 - DNA, 456 bp, Sorghum bicolor
  unsure (1)..(456): unsure at all n locations
cgtccgcggacgcgtggggatcgatgttgtgtgtttcaaatattggctctctatttaccattattagtgtagtctttttcaatggtaaattttatataaaaaagcttatgactactcagattgtagaggtatagcaaattctattttctttctgtagcaaccgaatttccattgttccaaaagttaagagcatcttcgcttccagcagggctacacggcatggacaaaccactcggcaagaaccaccatcggcagcagaacatccaacctgtaaacaatgtttatctaaacttcttgtgccatgctatcgaatctgtgaaatatccatgcaatatatagtcatgttaccttttattatttttagaattaacccatatatgtaatatatgtgtgatgtatataattaggatgccntcaattcatagttgacatctcatcagaatactgcacacaact

SEQ ID NO: 459800 - DNA, 340 bp, Sorghum bicolor
  unsure (1)..(340): unsure at all n locations
cgtccgcggacgccgtgggtcgaggagaatgataacanattattttccacanaaaaggacacacaacacaatattcccaacttacatcgctcacatacaactgaactcccgtcacgtacacaaggtctacgagaacaaanaaagatgatgacatcttgcattattttctgtcgtctncacaccgtgcgatagctgctgcccggcccgtgtctctcgaagaagacaagtccaacactggtgctgcctgactgctgaatatgctccacagcttcatcccacacgcgcggacccagcaggacaagaacacgaacctganacaganagagagagagggagagag

SEQ ID NO: 459801 - DNA, 139 bp, Sorghum bicolor
cgtccgtgctgagacagaggtggtggaggccaaggctggtgctgggtctgctaccctgtccatggcctatgctgctgccagatttgttgagtcgtctctccgcgcgctggcttgcgatcccgatgtctatgagtgcaca

SEQ ID NO: 459802 - DNA, 274 bp, Sorghum bicolor
cgtccgcggagagccactcccggcgcaatcccttcgcacgacagggtaataatcaagctcaatcgaccgatatggctgagacgacaaacacggtggcgctggaggtgggtgagactgaggacgatgatctggactcccttgtttctgccgagaacctcctgcctcccgctggtgccgctgctgacgttcctgaggataggacagtgcgtgtcaagtcgtgctgaggaagcaggcccttggcagacttctcgcgcgggacaacgggctggcttgg

SEQ ID NO: 459803 - DNA, 232 bp, Sorghum bicolor
  unsure (1)..(232): unsure at all n locations
gacccacgcgtccgaccagaacctgctagtcatcatcaatctgatttgatttgatccnccattccattcttcttcttcttcctcgcggctgcgccatccatccagtagtcccaccaatccatggcttcagcgttcgggaccgggaccgcctccacttgcggcatcaagcctgcacctacaggagttgcgcttgtgccccaaatcacctttcctcgtctcgcctcgtggttcg

SEQ ID NO: 459804 - DNA, 227 bp, Sorghum bicolor
cgtccggtctcaaactacaaaatctcagatattattgctatctggttggatgactcatgggatgacagtgacagtcctcggcaagaagatcacgttctgagccacctttcatgtcgctgaattttacggtgctcaggagttggggctgaagagcgtaagagttcagggttgatggaaaatatacctcccagcgatttcatggtggggctgagagcatgtagtgaaat

SEQ ID NO: 459805 - DNA, 212 bp, Sorghum bicolor
gtccgattcccgtcaccaccgtcgcacctttacctagagagagagagcagcacaccgaccgacagaaccaaccacacacaacatacagggccaatgggatgacacgggggcacacagcccggacgcgaggggactgacctccccgggttcggtccaccacggacaggagtgggggcactccttgccgcgcggcggcgcgccgcgggtcatat

SEQ ID NO: 459806 - DNA, 429 bp, Sorghum bicolor
  unsure (1)..(429): unsure at all n locations
cgcgtcgcgggactcttctcgccaaaacagttagagatgaaatcgctgggtgcagcgaatagggttatgattccctatctgtaagtgatgcagagcanatgcttatgtttaatgctgaccaagatctgcacgagtacatcacagaggagcacccggaatgggagattaagaacggtgccgtcttcttccagaaggcgaaggagtcgcagccttgcaaggagatcccatccttgcagctcatcaaccagacgctatctacgcgaggggctggagcgattgatgattaattcatagaatccctgtgatgttatttctgggcactggatggctgactgccttacatttgagacagctctgatcgcccctctgaactggctgaaacatcatctgaatctctgaaggggctcgatctnccccggcattgggttg

SEQ ID NO: 459807 - DNA, 559 bp, Sorghum bicolor
  unsure (1)..(559): unsure at all n locations
cgtgcgctgtaacaatgaaacatacagcacagaattgctcccaatgcaacagctggatgatattagagaaccttctgattctgcgccagagatctccatatgcgaacctaacccgtgctccagtatgaactatggcacagtgcctggaagacactccatgtcagaagagcggcagagttatttgaaaagattaggttaccctgaatngcattcttcaaatntccttgaccttgatttgttgtcatcttcaaggaattcgtgtgatgaggaagtttttgagaggtcatcactgatcaattcacctatggatgtgatcagtgttgaatcatctacgtcatacagtgaacaaggacacatagatgagggcagggatgacacagatctttcccgttctagcagccagctctcagacgttcgggactattctgatcgctttgcgcactgngtcgcanatggaggcatgctntgctactaggccctgggttttgtctnggtgaccgaatttgtgacacagcaagaaatggatgtctagcggatagagcagacgaaaattgctgac

SEQ ID NO: 459808 - DNA, 358 bp, Sorghum bicolor
acgtccgattccggtcgccaccgcggcattacctacgcaccttctctcacattattccgctcctctccctgcgtcgcggagcagggactcccggggcgtggcctcaaatctgaggtgcgcagggcataaccagctgtgaagagacttcacaccagctgtggtcatcgtgtgtttatgagggaagataaagtcttgtggactgagagcatggctttttggagtggtgccttggtctttggtttgctcaatagcattgtgatgaactgacatggtaggagctcagatatccctggcccatgctggcatcatgagctgttatgatcacgcgtcaattcagcgtgggcatcaagttacacac

SEQ ID NO: 459809 - DNA, 222 bp, Sorghum bicolor
cggccgcgagttagtaatcacctcactactcttcaagttatgttaccaaacataacagacggtgggtctctgtccaacattcttgaacagtgcatgtattgtgcaatgggtcttggcttagttggataggatttccgtggcctccttccaccaatcttagaaatgcggatctaacttattctcaagaattgagtcgcggtgaaatttcacgtgctgatcaca

SEQ ID NO: 459810 - DNA, 430 bp, Sorghum bicolor
tccgaatcccggtcaccacgcggcgagctgaccactattcggccggccacacgacctgcccggttgttcttcgcacctgcgcgtggcatacctgtgaggacttaaacagaacggtgcatcctgccacaaatcgatgagaattgggagaaccaaacaatggagaatctgtctgataacacatccgcgtctgtggactacaacaaagtcacccagagatgctaatagttgacacttgtgattagaagctaatgaggatatgtgaaagtagacaattcaaatgggaaatgctgacagtgttttcaataccagtatgacatacatgccccaagattttcgaggtacttaatcaggcaacagcgagaacgctcagagagaaataagcaagccgaggtagatgctctggtagtgctggggaagcattcatgatcga

SEQ ID NO: 459811 - DNA, 216 bp, Sorghum bicolor
cgatcccggtcgccacgcggcgctataaagggcctacacctatggtattttcaagagtatatatacagcacatatgcatacattgtctatgggaggaggctaaccttttgtgtcgaccggaggaaaaactctactggcttgatcctactctattctgatgggtaagatatgcatcagcgtatggctaaatataatgttcacacttagactgcatgg

SEQ ID NO: 459812 - DNA, 311 bp, Sorghum bicolor
  unsure (1)..(311): unsure at all n locations
cgtccgcaaccggcaagaactcatcagctnttggttcagctgatattgaataagctagaaagcaatattgagaagtttgcttttgtatgtggttatctaggattaccaagtttacattgattntgtattctacctgtttgcttcatctctatccactaacccnctatttccatacaaatgtcgattctataactnttcaattagttngcaagtgtgctgatatagcagaacaactaactgagatgctcattgcagagtctataattnttccatatctctatgccacaacatactgatatagcagagtctgc

SEQ ID NO: 459813 - DNA, 276 bp, Sorghum bicolor
  unsure (1)..(276): unsure at all n locations
ctacatcatctccatattcaccccaccctctaacttactctccgagcgactccttcatctcaaatttaacattctccatacgctccccntgttacctctgttctaaaactaaccgaccttcaactacaccacgtccgtaaaaactcttctcacgactntacatcaaccacataactcatcacatgtatgtctctactccactcacaataccctcctcttcccacttcacttactaccaaaaaataccaaataccaaaatactcataaactaccttt

SEQ ID NO: 459814 - DNA, 229 bp, Sorghum bicolor
  unsure (1)..(229): unsure at all n locations
ttcatacttnactatatatttttatcttaaaaatatactctctaacatncattacattaataatcatattctcactatcaattatttcatatactacatatcaacaaataacatctaatctattcccattactattttttttcttatatatctatatatatcatatatttacacacaaaacacatctttntaatattttctctctaaaaaattcttactatatacaaat

SEQ ID NO: 459815 - DNA, 89 bp, Sorghum bicolor
atctctgtcgctctctcgctatctcctctacgtcaagagtcacacaagcaagagaccgagcgagaggatgatgtggtcgcatgagccgg

SEQ ID NO: 459816 - DNA, 193 bp, Sorghum bicolor
  unsure (1)..(193): unsure at all n locations
gtccgatcccggcgccacgcggcggttcgcaggagacctgcatgcggctgtacacagctgctgcgcagaactaagccttggaaggagtaggacaatacggggacacacactctctacaatcgtggcacaggacatctgaagcaccttacctgagcagggctgntctggcaatcctacataccaccctgacgtg

SEQ ID NO: 459817 - DNA, 186 bp, Sorghum bicolor
  unsure (1)..(186): unsure at all n locations
gcggccaccaccgccaccgtcaccctnctnctcctgctcctcccggctctcgccctccgtctcgcccggcaggccccggcgagcacatccgcgaccatgggctncnacncnaggctctccttaccgtgccgcctgccctcgctcctccctccgccggtgctgctgcgccggttgccccgcgccgcc

SEQ ID NO: 459818 - DNA, 583 bp, Sorghum bicolor
  unsure (1)..(583): unsure at all n locations
cgtccgctgatactgatcctatctgagcaactggatttggtctactggatcaaggcgaatgaggctaacttcaccccagtgtatatggagtgtttgatgcaccaagaactgccgttaattcattgcttgctggctgggaataaaaacataagagtcctgatgagaggttaacacaagaattcaaggaacaccataagaggtggatgagagattccagtcaagtgtttaatttgcttcctttcttggctttaattgggtgcacatggattctgattgtacaagaatgctaggacagaaacttgcctcccagatagcagtaacttggatgccatgctntactgcttgtacaaagggcctcctagctagcagtaacgtggatgacaagctcttctggttgtacaaaggtcattgtatgcaaaggagcagaccacggttgtaaacattacaagacatgttttctatttatttatagcacatatactttgctaagtgttaaccatgtgcgtcaaccgatgcgcgcgatggcgcgcgcattgcactggtacaatggcctcttcgtgttcggagattcattcgccgacac

SEQ ID NO: 459819 - DNA, 359 bp, Sorghum bicolor
cgtccggcatatccaagcgcttaaaccacactcatcagatcaaccacaaacagcctcccgagcagaactcgctcgtagccccgagaacgagcagccctcctcctcccgctgcagcgagatggctcccgagcttgccggcaagatgaccgccaaggccgctgccgccgccgccgccgcggcggtgacgaagcccgcgagagggcgacgtgacgttcctggcgggacgggactactggaaggcggggggctggcaagcctgccaggccgtcgggaccgtggggggcgctgccacggccgagcacgcgatctgttgcaggtgatgtcgcagacacccggaccgctgaaccgaccagtcgcat

SEQ ID NO: 459820 - DNA, 527 bp, Sorghum bicolor
acccacgcgtccgtcgacccacgcgttcggaaggcgtcaatcctcggctaaagctgaatcagaacggaagcttgcaagggccgaggccctatcttcatgagtacggatcagatgccttgaaaagggccaggagctggaggtcggttctaattatagtagacacaaggagagactccactcaagcacaaagaacagacgggtgcgccaacatggcaccgcaaccctcgctcaacgcatatagtatcagcggcgcggatgtatcaactacaccaaagattaccctgcgctgatgggcatagttgacagaagtgctgcggcagcagcgggatggtgtcagtcgcgtggtgtaggacatgttccatagaaaaaacatagatgagtcgacaggttttggggtattggtctggtcctctgtttattcacctttctgtacaattttagtattattgtgccccttcccctggatagcttcggtcagcgcttaaaataaggtaagtgtgtagcataatggcctatttttttttttt

SEQ ID NO: 459821 - DNA, 195 bp, Sorghum bicolor
  unsure (1)..(195): unsure at all n locations
tccgatccggtcgccacgcgtccggctctatgtcagctctttcttgatgactccggttatatcggcgctaggtatagggaattttgcatgaatggtgaagctggaacatattctggagaacggaactgcatgacataggcaccgtagttcatatctagctntttgactgctgttggtgggtgacgtggcctcgga

SEQ ID NO: 459822 - DNA, 349 bp, Sorghum bicolor
  unsure (1)..(349): unsure at all n locations
cgtgcggtgcctcgctgtctccacacacacctcatccccaaccatggcgaacgccgccgacgacctggacctcctgctctcgctgngcgaggccgtcccggagacccctgccgcctccccccgcgccgctgccgatggccccgtgtgcgacggcgccttcacaccaccaaggacggcgcgccccggcggcaccgacatgtccgttttccgcgacgtcgtcaaggatnacctcgaggcaacccccgaaaccacatccncgctggccaatcgccccaagcggcccaaggccaccgaaaccctcgtcgacatatactccggcctccgcatcaagcacctcacgctctctccc

SEQ ID NO: 459823 - DNA, 81 bp, Sorghum bicolor
accgtccgatccgcggccacgcgtaccaacagcgaaagcgcaggggctcatgatctcgagttggccccggggcagcgcgct

SEQ ID NO: 459824 - DNA, 374 bp, Sorghum bicolor
  unsure (1)..(374): unsure at all n locations
cgtccgcacaatcccctcttcttcttcttccacanacactccacgccagccagaaatcctccaatccacacacgcaccgtcgtctccgtgaggtctgagcgaggtaggacgaatagctctgagcgagttcttccgtcttccaggtagaatcatccttgcagctctcactctcctcttcccgtcgctcgtctcttgttcatagttgttggattcctctntcttcttccttggatcctactagctattacaacagagctccagagcctttagtttctggctctgatttctccttcttttttttcttctttttggtggatagcaagagaggtcttttccacaatctctctgtcgtcagtgatcatcagcgagatctg

SEQ ID NO: 459825 - DNA, 293 bp, Sorghum bicolor
ccccaacggcgcatgcaatgcatagcaacatatccatatgctgttgtgtgctacgtacattaaaatctctcatctgacaccgtccatagatagtagttacaatggcatgaatgaatacgagtgtacacaagcacaagaaggcgactacaaaataaagaatcgtcaggcgccgctccgtggtgccttctgaaatccttcactgcgccgctgctgcgtcgccgccaccgcatttggcacggcctttgtcgtcgttgtcgccgtcgacacgtccatcggcctgtggctggcgcacc

SEQ ID NO: 459826 - DNA, 165 bp, Sorghum bicolor
ccgatcccggtcgaccacgcgtgcgggctgctctcggcccagtcagtataccagacagagaagaagagaagctgcatactccctttgcgatcgatcacactcgcaataactatagcagcatgacagcatggggcgggcgtcagcaaagcccgccgcccgaacgtg

SEQ ID NO: 459827 - DNA, 166 bp, Sorghum bicolor
cgcctcgtgctgtcctcccgctaccaaccacagtccctcgatccatgggtgcggaggaggagcgcgacggcgaggagcatcgccgcccgctcctctccttcgccccgccagccgcggcggaccagcaccagcagcagtaccagttcctgggccggagcagctcttc

SEQ ID NO: 459828 - DNA, 306 bp, Sorghum bicolor
  unsure (1)..(306): unsure at all n locations
cgtgccgcgacttgtttgctggttnttcctcctcccgttcgcttggcttgagcgacggctagggcgaccgccgccgccctacgcccagctgggcatgtcttcttcgggccctgtgccggcggcgggaacccaccacaccaggaatcgtgcaaacaatcggcgcaagtctggagatagggccgatagggctaattactcctacaacaatgatggggagaagagtcatgttccttcattaaagaaccttcctccaattgttcatcatgaaacattcttcagcaatgttcagaatgactacaatcaaac

SEQ ID NO: 459829 - DNA, 183 bp, Sorghum bicolor
cgtccggctaaccacaccaaaccccccggtcatggcgctcgcgtccacctgcgccaccgcgcccgctgccgagctcaagaccccgtcgttcctcggtgccaggcggcgctcgccaatgccgccgcgtgcaagcccgcgccgcgccgtcgtcgtgcgcgcgggcgcccagagtgggtccgctaa

SEQ ID NO: 459830 - DNA, 368 bp, Sorghum bicolor
cgtccgcgcatggcgtgacgcgcccgcccggccggccgctccttttccttccacccatctcttcctttactccaatgaagcaacacaagctgctgatccatcgattgatccaccaaaaagctacgtacttctgatccaccatcgatcacttcataattagctaccctcttttccttccttcaattcgattgatcgagcaggaaattaagcaaaggcaaaataagcaaaaagatgcagcggcagcaggacgatgatgacacggtgcacgccgcagccatcgttttggccgccgccgcgagatccacgagcacaggcctcctgcgccaccagcagcagctcgacgaccacgaccacgccagctgcgccgc

SEQ ID NO: 459831 - DNA, 207 bp, Sorghum bicolor
  unsure (1)..(207): unsure at all n locations
ctcgtccgtaaaaaaaaaaaaaaaaaaaaaaataataaaaatattaataaaaaaatattaaaaaaataaaaaaattaaaaaaaaatatatataaaaaggtgctgccattcactttcttttactttctatattctatatctctacttttctattaatntattttttttttttttttttaattcagttataatttttatttttattttt

SEQ ID NO: 459832 - DNA, 466 bp, Sorghum bicolor
cgtccgattctcctttggtgggggaaatggaggccgacgacgccgccgcgacggggctttcccagagaccggttgtgctgtacccgtcgccagggatgggccacctggtctccatgatcgagcttggcaagatcctcggcgcgcgggggctgcccgtcacaatcgtcgtcgtcgagccgccctacaacacgggcgccacggggcctttcctcgccggcgtctccgcggccaacccgtccatctccttccaccgcctgcccaaggtcgagcgcctccttcccatcaagtccaagcaccacgaggcgctcaccttcgagctcgtccgcatctccaacccgcacttccgcgagttcctggccgccgcgtccccggccgtgctcgtgctcgacttcttctgcagcatcgcgctagacgtggcggaggagctccgtgtgcccgcctacttcttcttcacctcgggccgccg

SEQ ID NO: 459833 - DNA, 300 bp, Sorghum bicolor
  unsure (1)..(300): unsure at all n locations
cgtccggaccgcgaggagcacgagtaccggaaggtgcccaacggcctgccggcggtcaacactatgacgacgtcgtctcttcgagagctgtggaccttcgattactagcagtagctgtccaaactaagagtgtgtgtgtctacggtgtaccaggagtactgttgcgtgcaactgtgcgtgctaatccaattccaacgtgtatatatatctgcagagctgtgtttgtgccttacatgcatatacggacgctgagacagtgtaaaactgaagatcaagtcattgagccactgtcncgcnnna

SEQ ID NO: 459834 - DNA, 378 bp, Sorghum bicolor
  unsure (1)..(378): unsure at all n locations
cgtccggatcatgcagagcatccagagaggcagagatcctggagtgatgatctacatgctgccccagggccctgggagatcaaaggcaaagagctaccatggttggggaactcagaatgaatcattctggtgttgctatggcactgngatagaatccttctccaagctgggggattccatttactttgaggagaaaggtcaaaaaccagcactatatattgttcagttcataccgagcacgttcaactggaggactacaggccttactgtcacacaaaaactgatgcccctcaactcaatgggatcagtatcttcaggtctcattctccatatctgcaaaagacagacgggcagtttgcgacattgaacgtgagaata

SEQ ID NO: 459835 - DNA, 461 bp, Sorghum bicolor
cgtccgggctttccccccctagattctctctcgcgcgaccgctttcccttctcctggccatggcccacgagcgggagccgctcctgcagcaacgacagaccggcgtcgggcaatgccgccgccggtgctaagggctcgtcctcggcgccggcgccggcggcctctgccgcgctgccgtcgctggctaggaccgtgctcaagttcctgatgtgggcggtgttcctcacctgggccgcggggatcttcctgtacccgaccaagcccgtgcaggcagtgttcacgaagtgggtcaggctcagcaaggagtccatgttcggcatcgccgggggtattttcctggccttcagcgcgcccattctgatcattgcgcttctcgcatatgtctacatctcattcttcccgagtgagcgtgtggtggaaaaaaagaagctgcggtcactgagtttcaagcctctgacttt

SEQ ID NO: 459836 - DNA, 462 bp, Sorghum bicolor
gtagcagcagaacagtccaagcaatttataaaactatcagctcttacaggtacaaccaatcaagccaagcaagtttgacaacaactcatctcacaaaccaggtgatacgacacggcgtgctcgcacatggagccacaacatacaaaggagggcctatccccgagaggactcaggtccgatgaaaataaaggtagcatgcaaatctgccacaagtgtcttgagaaatggaggagacataacttgagactaggcgatgagaaaacgtgactcaagaatccttgcccccattggaggacggcatcgtcgtggacgaccgcaaagtccctggcatgttcgtcaagaacggttcgaccatgtctggtctggtcggcaccggggacaacttctgggcggccatgtacttcctggcgtccacgctcggcttcctcctggcgttcaccctggtggaggcttactacgtga

SEQ ID NO: 459837 - DNA, 462 bp, Sorghum bicolor
  unsure (1)..(462): unsure at all n locations
cccacgcgtccgttttttttttttttttttttttttttnnnnnaactctatatgggatctttattcaatataagcgttcagctcttatcaactgaacatttcaattcaccgtgaacagggggaaagaaatgagagggtcctcaccgctcaccggcttggagtaactgagcaggaatgaagcccatggcatccctccgactcaactcaaggtccggattcgaatattaagcatccatggacgccgatgatggtggggagttatctcagtctatactacagttgatactttccattattttcatccgctataatatagtcacatttggaatatgtgccaacttgttcttatcctctccagatttgcatctcttctcaagcactggtccacagtttaaaagggtcaaggtctgcaatccggtgagctgttggatgcatgcaagtaaagttgtcataaaagaagtc

SEQ ID NO: 459838 - DNA, 444 bp, Sorghum bicolor
  unsure (1)..(444): unsure at all n locations
aattttgggtcgacccacgcgtccgcgtgagtggagtcattcaatacgctcatgctgtcgttaaggacccatcccgaggtggcaacatcatgatttagtatctgcagatccctacgcgccacatagtgaacgatcagctactgacaatcatgacatgacttgccatactgtcagtgacctagaggtggttgacagggtcactgaatattcatagagctggaactcactgaatttcanaaagatttgacttggtctgttaattatcctgttgaaagataccctggcacacagggtccctactactgtgctgactgagcagacagaatcattgggcgggacatatgatattgctactacagcgttgagggaagatgtggacttaccattaggcaaacaaacatgtaggtaacgcctagtcaatcccagaaccgataggcacctaat

SEQ ID NO: 459839 - DNA, 159 bp, Sorghum bicolor
cgtccggtcgcggcgcggacggcggcaatggcgatggcctccacctacgcgccaggcggcggcgcgggggcgctcgcgccgggaaagggcagggtccgcggccccgctgggctcggcttcctcagcccatccaaggtcggcgtgctcccccgccctctc

SEQ ID NO: 459840 - DNA, 209 bp, Sorghum bicolor
  unsure (1)..(209): unsure at all n locations
accggcaccggggcgcaaggcggggccgccagatggacctcctcgaggacgacgacgagttcgaagagttcgagatcgaccaagaatgggatgacaaggaagaaggcaatgaanccgtccagcagtgggaggatgattgggatgacgacgacgtgaatgacgatttctcactgcatctgatgaatagagctgtgaagggaaataaacgc

SEQ ID NO: 459841 - DNA, 437 bp, Sorghum bicolor
cgtccgatcgactacctgaagcagctgcaggcgcaggtgcaggtgatgagccggatgagcagcatgatgatgcccatgggcatggccatgccgcagctccaccagatgtccgtgatggcccagatggcgcagatggcccagatggcgcagacgatggcccagggcatgatgaacatgggctccctcgcgcagcccgggtacgcgggcctcacgccgcccatgatgcacccgccgccaccgttcgtccccatgtcctgggcggaccctgccgctgcagccaccacctccggcgccggcgccggccccggtccagcagccgccgccgcctcctccctcgcccagcatacccggcggcggcggcgccgccgtgccggacgccttctccgccttcctggcctgccaagcgcagcaaagcggacagcagcagcagccgggta

SEQ ID NO: 459842 - DNA, 143 bp, Sorghum bicolor
  unsure (1)..(143): unsure at all n locations
cgtccgnaaaaaaaaaaaaaaaaaaaaaaaaaaaaaaaaaaaaaaaaaaaaaaaaaaaaaaaaaaaaaaaaaaaaaaaaaagggngggggagtgggaggataaaaggttgggtgcgcgtgcattcaaagttttattttttttt

SEQ ID NO: 459843 - DNA, 372 bp, Sorghum bicolor
cgtccgggaggattttgattcccatttttccaacagattttatcatagctatctggataaccctgtaaacatcaattcttcgtcaatagctgcagctgctgctttggttgccagatcactgtatattcttgctaatgatggctcagttgtcgatctcataacactaaacactataaaagtgaatgtttcattggtcgaagaacttattggatgtctgcttacttgcaatcctggtctttcttgtggccttgcgaaaagattcatttctccaagcaattcctgcccaagtcatctatgcttctcagctcacggccaagccaaggctgctggagccagtgtacctggtggagattcaggccccagaaaatgcac

SEQ ID NO: 459844 - DNA, 163 bp, Sorghum bicolor
cgtccgaaattatgtataagcttatagacatatagcagctggattatggcttttagtgactctgtgtgtatgtggtgtggtgtgaatccttgagtgtgcatgtgtatttatttaagataaagctccgatgccattcatgcacggtaccatgcgagatcaaaaa

SEQ ID NO: 459845 - DNA, 340 bp, Sorghum bicolor
  unsure (1)..(340): unsure at all n locations
cgtccgcacgtgtgtgaagcctatagacatatcaaaactctattatggcttttacagactctgactgaatgtagtgtgcactgacactgtgtgggggcatctccaatcagtcgggactaatctccctccccattcaatcactattccaccctagatcaatcatctcatataacaacccgccgttacaaacgatccaaccttacgtactcgagcctgccactttatatctcttctataatattacccaaattcatctcactggcctantannnacnncttcttcactgccaaaccccaatcataacctatctcattcttattcaaacacatacccctttca

SEQ ID NO: 459846 - DNA, 331 bp, Sorghum bicolor
cgtccggccacgtgtaccgcatggtaacactgacgagcgcactgtgaagctcgcgtctacggcgtggtatagggcatgcgatggttcacgcgacccataccagatgccatacgatatgcctcttgatacgactatgcttgcaaggtagatctgaagctgcaactgacacatccaatgatagatctattgctgtgtctctgttactgtcactggtattcttacttgactacttaccacaaatttaatcagcaatatcctatgctgcacagcatggtgtataaccttgtgtatgaccgaatgccaggcataatgagacatgcactggatcatg

SEQ ID NO: 459847 - DNA, 429 bp, Sorghum bicolor
cgtccggtcctaacgtgctatctactgcactgaagggaggcatgaatagctctaactaacaaggcattgactaaaggatcagcgctatatatatgtactaaaggatgagcataacttcatacaacagtatgggcaggctagagcaccaaatcacgggggttgtgagatcctgaaataatgcatccaatacaagctcaccatcgcataccttgtattgtgtatatcatccaagggcccaatgataccaagcatctgacagaccaagctactaccatgatgcaccagaataaacgccgagagggaagggctatgaccaccaatcgctgagcatgagagaggcatcaactgtgtactgactaatgaccctgaccgccatagctgaagggtactactggacaaaacctgcagggaaggatgttatcaaggtca

SEQ ID NO: 459848 - DNA, 478 bp, Sorghum bicolor
  unsure (1)..(478): unsure at all n locations
acgcgtccggctctcctcgatggcgtacggcaccgtgcctcgtggtgcacgccagtccaaccttaacgcaccacagcatgttgagatcgatctccactttatcaagagcgagttgctattggtaatgttcgagtgctccatgttttgacgacatcccagtttgctgacatcttctcctaaggccttctaacatgagagctgcaagaatcttggtctggtctttccggtcttcatgacagcctggtcggcaattcgattgcacgggagaagaggggttagcatgttgaatgtcaggcggctgcctgggattacccctgaccggcatgctgcctaggggctcactcagcatgttgcctgtccccctctcctctttcttagttaccagccaattctattcaacactcaaatgaaatatacgcgagcacactatgctctaacttattttcatgcaatntctaggttttggattttcttttaa

SEQ ID NO: 459849 - DNA, 208 bp, Sorghum bicolor
cgtccgtagaatggcagcttcctcgccgcccctcccgccgccgccgccggcagcgtcctccaccacgctggccggaaacctcacggcctgctcgctcctgtccatcccgcgcccgcgcccgcgcctcgccgcggcgcaccgccgggcggtcgtggccgcgttcgtgtcgccacggccccggcccccgcagccgtcgccggagggggac

SEQ ID NO: 459850 - DNA, 407 bp, Sorghum bicolor
  unsure (1)..(407): unsure at all n locations
cgtccggtaagaaatgggaagaacacactctcctggaaggatgtttggctgtatgagaaacctccttgtgttttattgcctgatctcttcaaattctgtgaacaacaaaatattctggtgaatcaagttagagatgacttacagagtatttcatttactagatggttaatggatgctttgctcacagattggcaaacggttcttgatgatatgagaaaactgaatttcacttctgaggaggatttggtttcctggaaatctgggactcttggtcgatttagtgtgaaatctgtatacaatgctatgactgcaaattattctggtccctatcataggaaagtctggaaaggaaaagttccttgacaaattaatntttttttctctgggtattgatgaataatgcaatc

SEQ ID NO: 459851 - DNA, 440 bp, Sorghum bicolor
cgtccggggtaggagctgctatagatgcatagtgcatgctatgcactaagacatatactacacatacacacataatgaagagaggtgatcttgaaaagctcaaacgcctcatgatgaatcaatgcactatcacaaagtatctcgtcatgggtgctacgcactggacaacgtatacaaactgtgcagtgattcattgctagatacaggagagagccgccttaaccaataggtggatcctgtgaatgaaatatagcgtgggatctcgcaaagagctatatgagactataccactcacactaacttgttgatcttgaagaaatactacacgaatgatgcatcgggccagaagtatctaacactgatgctcaggcagctggagggcagcacatgagaatatgcatatagctcagcgtgcggcctatgcagacactgtatagaat

SEQ ID NO: 459852 - DNA, 432 bp, Sorghum bicolor
cgtccgctccgctcccctctccggcatcgcgccccgctgctgctgttgccgttccctccccgtgcggcctactccggcgaggacaccgcagcagccgaccaggagccggccccggcggccaccaagacggccaccgtggacgacgacttctagcagcgcgtgctacagatcaagtcccgcgtcgggcccaagaagcgcggcgcgcgcaagaagaaggccgtgacgttgtccgcgtccgtcaacgccgagacgctcccgcccgtgccgctgcgggagccccggtcggcgctcggcgcgcccgtcgagttcggcttgaccgcgtacagcgagcggttcaacggcgcgctggccgtggtggagctcgccgaagtgctgctatgtgagctgggatccgggcaggtcctgttgaagtgctaccagtcggtcacgctg

SEQ ID NO: 459853 - DNA, 450 bp, Sorghum bicolor
cgtccgagaattcagggaaaaagatatctttaatcactcgaattcctctgccttttcaagatatggcaataaaaggatagaaccatcaggggaaatacaattttttccttctctctgcatcactgggcaagagcatgttcatggcaaggacccagttttccaacccattggggtgttgctgcctcccaatgaacataatacaggtgagagtacaaggcaaactcgaattactttggacagtagcccggagggtgctgccatcatgtgttccagtagtgctagggaagatgctggtgtaagtagttcttcccatagaaaggacagcatgagccatccgtcatatgggtttattcctgttccaattcctgtcgggcctgggatgccctaccattatggtgcaattctgcagccagtatactacccacagggtcctcttatgcactgtgattc

SEQ ID NO: 459854 - DNA, 419 bp, Sorghum bicolor
cgtccgcccacctctcacccgcgccgtcaagagcccagctgcccagtctcagtctcagtctcagtctgacgccgccccggccccgccaccaccacgcccggctgaggccgccgcctcgtcccacgtgctgcgcgcgagcccgcagctcagccggtggtcccgggcgcgggcgctgcggtcgggccgccggccggggtcggagtcggaccgcgccaagctgtcctcggcctcggtgctgccggcgaccaagtcgccgcggcccgaggacgctgcggtggcggtggaggatggcgaggacgacgacttgtgcgtggccgagagggacgccgcgcccgggaaggccatctacatcgtgtcggaccggaccgggtggaaccgggagcacgcggtgaacgccgcgctcggacagttcgagcact

SEQ ID NO: 459855 - DNA, 89 bp, Sorghum bicolor
cgtccgctctgcccttggtcggcggcaacgaccacccgccgccgcttccggtgaaacaaccggttgtaggtacaaagtagaacctgatg

SEQ ID NO: 459856 - DNA, 83 bp, Sorghum bicolor
tacgtcgattcgtcgccacgcgtcgtgttcggctatggcatctactctgtaagatgttcaggagcaaaacaacacacatggtc

SEQ ID NO: 459857 - DNA, 154 bp, Sorghum bicolor
  unsure (1)..(154): unsure at all n locations
cgtccgatcgccggacaacaccgtggagttctccaccgtctactacggcgttcccgggcacttgccgaagcctgacgacgaagcctccgagtccattctctttccggtgaagatggtctgccggatccacgagtcangcgacgtggttctcgac

SEQ ID NO: 459858 - DNA, 356 bp, Sorghum bicolor
cgtccgggtttccagctctggctcaacgagattctgcggcagcatcgactattctaaatcggcatctggatcacgtttttagattgcccttgtatggaccatggagcatttttggagtaaaaggtgagaacctgagtaagcggtgctacacaaccttgaaggtcaaacctagctgtgatatggaagaatcgcagatagctatcaaggatgctacacagagaaatgtggtgggcacaggtactaaggatgctacagagagccctccgatcggggcaaccattaaggatgttataaaggacaataaaactgctattgatgttattatggcctgcaacaatcgatccgaacagtagcca

SEQ ID NO: 459859 - DNA, 312 bp, Sorghum bicolor
cgtccgatatggacccttttgagcctctgaaatatgaacagccactacagcaattgaaagcacgaattgcagaggaggggtcaaaagctgtgttctcaccgctcattgagaaatttattttgaagaatttgcatcgtgtcactgttgaaatgcagcctgatccagagaaatcatcacgtgatgaagcagctgagaaagagatcctaaaacaagtgaaagctagcatgactcaagaggatcttgcagagttggcacgtgcttcaaaggagcttaaggaaaaacaagaaacacccgatccttcaaaagctctta

SEQ ID NO: 459860 - DNA, 219 bp, Sorghum bicolor
aagacaacactgccgacttcttcggctagccaccggacaggaagaacacagtgccagcggcgaggagatagctatgaagggtacggccaccactacagcaggtcgttcatgcttgactgggcataaagcgtcatcctgactacgcatccttttcaagacaggttcatggagctggcgccaactaacccacccacagcttggcacgctcttgactagtac

SEQ ID NO: 459861 - DNA, 212 bp, Sorghum bicolor
cgtccgtaaaaaatatcaaatatagtacttgacaaataaaatgagaaatcttatataaataaaaaaaaaaaaaaataatattaaggacataatgaaaaaaaaggggcggccgttttaaaggttccaaattaacattctggttcttgcaacggtgttgtcttttttatggtgtcacctaaattatattaagtggccgaggtttaacatctttt

SEQ ID NO: 459862 - DNA, 140 bp, Sorghum bicolor
cgtccgctctcgacgaggactatctatccattaatactatcagcgaggattacagatatgacgatccagacgaacgtgctgacaaaaagaagggtgactatacagctcgcgcatatatcgcaaaggacaacttatcagac

SEQ ID NO: 459863 - DNA, 149 bp, Sorghum bicolor
cgtccgaattctggtcgacccacgcgttcggctaaccacactcaaaccccccggtcatggcgcttgcgtgcaccttagccactcggacgcgctgtcgtactcaagaccccaccgattcctaggtgccaaggcgcgcgctcgccaatgcc

SEQ ID NO: 459864 - DNA, 85 bp, Sorghum bicolor
cgtccgacaggacatgcccgggcagacgagctttatttgcaaaggccttctgatacacattgggcgcacgtgggctaaacgccat

SEQ ID NO: 459865 - DNA, 330 bp, Sorghum bicolor
  unsure (1)..(330): unsure at all n locations
cgtccgtatatttcaaagaactcaaagaaggcatcacgggtaaagaggcattagaggcaacacctgcccaagtttgaagatatcattgaatgaagaattacatctgcttgcataaattctgacacagtaacctccactctgaatgtcttaagccatcctgaaagatagacgacgctgatgctaaattttgtagttgaagatcacaggaataaactagatgatactccgcgtgttgctgcggaaatttgtagtgttgtataattatttgacatttgatgaaacataaatacataatgaattttattgtggcnnatnaaaaaataaatatgg

SEQ ID NO: 459866 - DNA, 454 bp, Sorghum bicolor
  unsure (1)..(454): unsure at all n locations
cgtccgaaaggattatgacgaggataccacgtttctgtgcagagtctctctgatagatatagattgcaccagtggttggtgttatcttggatgcgatacctgccaaaagtcaatgggcagggccccaagaaagtacaggtgcagccgttgtggcccgattaagaggccaattaactggtacaagctgaagacgacggtgaaagatgccacaggcacaatgaccttgatgatcttctgtgaggtggcagaggagctggttggtgtctctgcagaggagctcgttgatgagatcgaggatgacgaggagtggtacaccctgccagaagaaatcgaggatcttcttggatcgacccgcaccttccaagtattcgacaagcacctaagcgggagcttctctgtatatgcaatcatggacgatgatatcgtcccagtncctgctgcaaccactagtcaa

SEQ ID NO: 459867 - DNA, 368 bp, Sorghum bicolor
cgtccgtgcacagatcatagatagagggaaggcctagaacatggacactgtatctctcggtgcatgaccagctgtatatatggttcgaggatgactacgctctgctacaagctataggcggagaatgttacactccatcgaacaagtgaatgatacaccaatagattgcactccatttgtctaattaggcacgagcacatgtcactctgtggtgcaagccatgcaaatcctaatgacacagatacttccctatcattggcgcctgcacagatatcaaaaaggtatgctacaatcacatgcacgaataaggatctctatctgactgatcatgggagttaacatcgtacatggattaccgacaactaagg

SEQ ID NO: 459868 - DNA, 275 bp, Sorghum bicolor
cgtccgatagcgcgtctacgccttcagagtacatgaggactggcggggcttactttattaatgacctaaaccaaagaggttagtagcaatctaaagtgagtaacatttaagaatgagtggtgaactcacaaggcactacattgtattatgcaccctggtatgaactgatacatgtggaacactagaatcaagttatttatagatgctgacgtacctccgcaaagatggtgtggatctgtcattcaacgcgtgcatctggatacagtgcagatata

SEQ ID NO: 459869 - DNA, 434 bp, Sorghum bicolor
cgtccgaaccacagccactggagcttcaacaacctacgatttccacttcctcccccgctcgccgctccgatggccgtcgccgaagtggcgattgaggttcccccgcagcagcagccggcggcggcggcggcggcgacgcgggagccggcggtggtgccgagagtgctccagtacctgtacctcgcgagtgcgtgggtagcctgcgcgggcgtggccgccgcgaccgtcgcgcgccgggccttgggcgactcttccccggtggtctgggcgctcctcaaggtctcgatcggagccctcgtcttccccgcgctgctcatcctcatcttcgccgtgcgggtcctgcgcgccatgcttgcggcggggttcagacgtgcgctccgtacccacgccagggagattcagatccaagccaggtagatgtttggagcgttaac

SEQ ID NO: 459870 - DNA, 244 bp, Sorghum bicolor
ccggccggattcccggtcgaccacgcgtccggctattgtatcgggggtccaagagaggaggatcagctcatgctcacagcatcatctaccctgtcccccctggcctcaagggactcgaacttatgggcgagcaaaacacgctgccaatggctctgctcggaaaactttcatctattaccatgctgaaactagtcagttgtaaagatacaacaggggatggatgtgatccattcatcacattcaa

SEQ ID NO: 459871 - DNA, 450 bp, Sorghum bicolor
  unsure (1)..(450): unsure at all n locations
cgtccgaacctgaaatacgtcttgtgtttgcctctctgttattggagacagtcttacgtctctctccctctccctatccctatccctctctcacccgacctgacgaggcgacagcggcgtccctcagaggcggcgccgcagcggcccagcacggcggcccgcgcggctaggccgcaaccggtgcggccatcctcttcctcttctgcttcctcctcctcctcctcctcctcctccctggcgtggcggagtagcagccagaccccccgttgccggagattgacagtgtcatgaacctgcggcgctgcgccgcctgttggccttcggcggtgctcagtccggctgctgtgccgcgtgagcgtgccttgctggtcgccggcggtgttcctnccacctngcgccgcctactcctggcgtccacctctgctactgtgctacactgaaccctagctg

SEQ ID NO: 459872 - DNA, 581 bp, Sorghum bicolor
  unsure (1)..(581): unsure at all n locations
cgtnccgctgacatnggnnatagcaccnnnacgtgtatgnncttacannnctcaataannttgctcttcatntnggtttgcattttccacncnntgcaatanannttgtagagtgtggatgngnnaattaccanncaagtgagtagaaaaatagngnaatccatgnntgtcatacgnnntaattgtatnnntcttgatattanncttccatanannttgtgcagtttggatagggtgccccagcttatatgtcgcnnatggatttcagtgnnatgccattgcataaagtanggatgtgactaaagnntttgttagtgaacctaaagtcttggttgggaccttgttctttaccatctgtatttaaccaggnntaaccagttcgtcattatttcatgcgaatcaaatgaaaacacntnntttatatgaatcaaacctgtttagnaaattttagctgtgcttgccactaataaaagtcatggtatttatttagtagaacaaatggctgcacatagtattttctttccccaatgcagtagttttactgaagtctaccatttaagttttttcatgaggtcgaaaaa

SEQ ID NO: 459873 - DNA, 498 bp, Sorghum bicolor
  unsure (1)..(498): unsure at all n locations
cgtccggctctgactcacttgttggaaggccggcatgtggttgaagcaaatgaagactactccaatgatatggatctggacataaaaccaaagttctggagccagctgcagagcctgctgaagaggatgctggtgggatccctgcctagcagcacaggcagagtagtttcttctgtcagccaggtcagcactaacaacagaacagaagctgctaagctgaaagagatgtatcgtttgtcgctcaaatcttctactctgggccagctgcatgagttgtacaagctttgggtatcttagcaccttcacttgacaaatggttgctgctcatgttttatgtcgtcggcatctgtctcttgaattacacagtttgtatctggtgatcacggcacgcntttgtttgttttgatttctaggtaagttttgaagctaaatacctgtaggctgtagtgtacatttaagtgtnaccatgggatgtcagggaacgggaaacactagcta

SEQ ID NO: 459874 - DNA, 375 bp, Sorghum bicolor
cgtccgcgcctgaggtcatcgcgcccatgttcgcggaggataacctgtgtttccactatctgtagctttacacgaacgaaacactacaagcacggtgtgcactccgacgtgtcaccaaagccctactgactcatgatcatgcatgagatactcgataattacacacgactattaccgttccttcaattccaatgatccagcattaaattagtccttgacatcgtatacccatgaaactgactacagcaagacgatcatgacacgctgcacacccaagacatagctttgcgcgtggatgacagatctacgagcactggcctgcatcttctccagcacacagacgacgaccaacatcacgccatctgtgccagtccg

SEQ ID NO: 459875 - DNA, 354 bp, Sorghum bicolor
cgtccggcgcacgatcgggtaccaccttgactatgatgaggacgacacacactatcccaaggtccagagcctgctgactgaggacgatgcaacactctaactgcccggatcagaagtcattgaggacagtattgttatatacgatcattcgacttcccagcagcgtgactaagatcggaacagggagccatcgctcacataatgcattaacatgaatttgacagatagtggggcgagggcattaatcatgaagctactgcgaaagcgcctgatagagtgcttgtcgaaggatgtgaccaaagctctgttgccagactatgccagggagctatgatgaagtttgtgacgatagat

SEQ ID NO: 459876 - DNA, 353 bp, Sorghum bicolor
  unsure (1)..(353): unsure at all n locations
cgtccggctgcaaggaccccgcggcgctgggagggtccagcggcagctccagcaacggcgtcagcagcttcacgtcgagcaataataccagcatgtcgaggtagtacgcacggcacgatacggcgatgcctcaccaacagctagtacggtacatgtacatgtacgcgcgccaaggccgtagatgcatgcagcagccgtgtacgtagatggtcgtagcgacattgattccgttttcaccatctggtgtcggtgcaccaacgggtccgtcctggcctnctgggtgtagtgaatttggatctccgtgtgccgcggaattgtatagatgcgtaaaggagcgcacatgggggggtagg

SEQ ID NO: 459877 - DNA, 210 bp, Sorghum bicolor
  unsure (1)..(210): unsure at all n locations
cgtgcgggcaaagtttacaggctagaattgagcaagggaaggggaactttggctgtgaaggagttgtggaagcgtgatgatacaagaggtgtgtaggcttatataaggacccttggnaagatactccatctgtacattttgaaacttaatgcatgtttgactggagcattanactntctggtctatgagtatgtggtgaaaggcaatctg

SEQ ID NO: 459878 - DNA, 401 bp, Sorghum bicolor
  unsure (1)..(401): unsure at all n locations
cgtgcgggaaaggacaaaaggtattgatagaagttgcaacgcagcatccaccttaaataacagaacaagagagaggcactcatacaattcttgcagctgtggccatccggaagagctctgagttatggacagctgtttcttgccaatagctagatctggcagagagatgaagatagcaatgaaaatcaagagttgagaaacctaggttgcagtaccaccgatgctatacattggataactttatagtgtcaaaaggaaaccgtgctggttgtacacagaaaaatgctatcccaaagcaagtatgggagcctatggatgctctaaggaagactaacttacacaacacangttatgattcaggtcaataaacaatggtgatccacataaacatgtgggttttg

SEQ ID NO: 459879 - DNA, 334 bp, Sorghum bicolor
gagagcagctgctgaagctcgtgcaaaagctgaaagagaggcacgccagcgtgcacagcgtgctgctgtgcaaagggcgcaggaggaagcccgtgagagggctgcagttgatgccaaagaaagagcagctagggttgctgcataagcaagggagagagccgctgcagaagcaagggacaaggcagctgcagaagccagggagaaggcagctgctgaagccaaggagagggagcggactgctgctagggagagggctgcagcagaaagagctgctactgaaagagctcagcaagaagcaaggaagagagctgtacgagctgcagttgaaagagct

SEQ ID NO: 459880 - DNA, 318 bp, Sorghum bicolor
cgtgcgtctactgtttgtatcctgtacttcatagatgtttgctagatttctgttaatggacagttttattggttcagaggaaacaagcagttcttgctgacaatatgttttcttttctccagtttgtgatgtttcttttgattgtgcatttgtgctgactgtcacactgaactttgtaactttgtcatatttctccaatctaaaatccatcagtcattttgttgtttccgcaccttgagctgctcagcttccttccgtgtttggcagcctaatctattattatggggtcactacgttgccagaggctcaaaactgact

SEQ ID NO: 459881 - DNA, 430 bp, Sorghum bicolor
cgtccggttgttatgaattccttagtgagattccacagataacatatatagtgcatttgtgcttgattgactattttagagaaagggttggggcattcatgcacaaaaagtttacttgtttacaagggcttcatcactatttgaacttattaacttaacatgtcaaagaatgttattgtatacatatatgatagcaacattaattctgtgctccaatgcatgtgactgtatatagtgacctaaagaatatggaattcattcagtgttttgggtggtattggtattaggagctgcagaaattggtaaaatgctactgttctattgtttgtccacctcaagggttagttttgtggttctagtatcacaatgcttagtgttcatcaggcttttatgggtgttggattacaacattggcatgcttacacttttt

SEQ ID NO: 459882 - DNA, 84 bp, Sorghum bicolor
cgtggcggacgcatacacaacacacagcacgctatcatctaatcgacattgcctggcgccacctatcgctatcaccatcacgcg

SEQ ID NO: 459883 - DNA, 64 bp, Sorghum bicolor
gaattccctgtccacccacgcgtgctgcgcccactactacttcatgttcgagaagttcctcaca

SEQ ID NO: 459884 - DNA, 360 bp, Sorghum bicolor
  unsure (1)..(360): unsure at all n locations
cgtgcgcgaaatgttgcttaaagcaaaagcaccaacaaaggtggttgaggatttcattcaaacagtttacagctcagatcgatcaggggcgggcagacaaccttaaggtagatcagataggcaaaggctcattgtttattgaaacacagaaggcattacaatggacttcagcaaacaaccatgtatatgagatttgatctgagtgattggtgcatgctaatgaacattggcagtggggtgagggcatatcttggcaaacacatgaacattcaaaattccaatccctttgccaaaaggaaataaancagatgtgaataggatgttgatgtcagccggattcatggtgttggcatatacagt

SEQ ID NO: 459885 - DNA, 355 bp, Sorghum bicolor
  unsure (1)..(355): unsure at all n locations
cgtccgggtttgtgttgcaaaagacaataattatgaggtttcgcactatatcatactgatggnttgagcatatgagtgtcggaagacacaggatggagactgaattgaggggagtatatttngaccaatgcattcttcaatacactagccttgtacatgagccgtagagctngctactaagcccacctgatttatcatggtaactcgatgtctctgactcacgaagtatactagccacaaagcaccaactaccgactatacgcgactgcagcatcaatctataaactcatgtttgaacagcaccatngcaagcgcctaagatctgaacctatatccaacagccggaacatgacct

SEQ ID NO: 459886 - DNA, 195 bp, Sorghum bicolor
cgtgcgcgccggtcccactgacgtcaccactgccgcccctcccccggggcgtagccggagccggagcctggagaggacgtggcggtgttggtggggcacccctacacgatggtgggcggcgtgcaaggcctgctgcgcgggatggcggatggcgtatctcggcgcgggtacacctcctacaccttctacatgcgc

SEQ ID NO: 459887 - DNA, 311 bp, Sorghum bicolor
cgtgcggacccacgcgtccgctctcagggtccggtcaggtgcatatataccttgatcgatcagatagatatatagatagatagctaggagcggattgtgttccaccaccgagagccaaaagccagccacagcatcgacatgatgcacgacttgttctcggtcccttcgtgtttctcggcgggggagaagctcccggacgtcccggcgtccgcggcggccaccaggtcctggcagagcgcggcgacgctggtctaccgcgcggggatcgccggacaggaccggctggtgactgtgacgtggtgcaagaacct

SEQ ID NO: 459888 - DNA, 154 bp, Sorghum bicolor
gaccagccgcggcccgatccgggctcgacggctcaccctccgccccatgcccatcggcgagcgggcctcgacgacaacgcgccagaagaacaccgaccgctactgcagccgtcgactggtcgctcctgccggaggagcttcttctcgtcatcat

SEQ ID NO: 459889 - DNA, 420 bp, Sorghum bicolor
cgtccggcgcgctaggccactcccgcgcgagccatctcccgcgtgatgcttccctgccgaatcgccgcgcgcgcgagctgctgcgggagccaacttccccgccaaatcgctgccgctgccttcatctcacaaacgggaatacaaatcgagcgcccccagactccacaccacaccagtagggaaggactaggaacagagaagaagacgcccggtgatctctgtgccaggttcgtcagctagctatacaaagggatcccaggtccgaattgaggatgaacagattaaagaagtctagtttccggcgaggcagtggtggccgtggaacctgacctccgtctgtccatggtcctatgacctctgttccggctgtaggtgcacctgcaactcaaagtcatgccactgacggtgctgcagcaatag

SEQ ID NO: 459890 - DNA, 201 bp, Sorghum bicolor
  unsure (1)..(201): unsure at all n locations
cgtgcgcaggatcaaggttcagctcatcgctttgcggatccatacttatatatggcccaacaacctgctctgactgttgaatcaagcacgagggacacaaacagcaagcgacgacttncttttcttgggccaccataattccatctattgtaatccaggtgatcaacagcagcacggtttcagctttggacaaaacccatc

SEQ ID NO: 459891 - DNA, 492 bp, Sorghum bicolor
cgtccggtctctctcccggtctcctcctctccttcttcgacgacaaggcgggctaccgccgccgtcgccgtcctacgcaggtgccgagggcttcaccagtctcttcgccgtcgacgagcactcactagagatgcaggatagaatgagacggcaggggcaatacggtgaagcagatatcaactccatggttgctgcccagttgcatcactaccaggcacagcaaagggtacagcagcaccctgagaatagctacagtggaagagaccctgcacaagcttctggggagcatcagtacactcccccgaaggtgagacagagtcaatgggatcgaggtggaccaaatgtcccaagccaggttccatcgtatgcatataacgaagcccaaggtgctggaggtgcgcaatccttttacgatggccagagatctgattcaaaggttggtctagagaagcagcccagcaaggaatttagggaccaacctcgtactgatcg

SEQ ID NO: 459892 - DNA, 257 bp, Sorghum bicolor
  unsure (1)..(257): unsure at all n locations
cgtccgctggggtgcatcaagatcagccccatttgatcaaactcatataaccactgttattcaagngactactgggtgcctagatcccgagtagtggcaaagcagtcagcggtcggggaagagtgacttttatagctttatcgtccatcttacagagctgttaactaggcagaaactcatttccgcagcacggcctgaagaatcatgcaacttggctatgcaccgagnggctctatttaatgaagggcgcccactcc

SEQ ID NO: 459893 - DNA, 299 bp, Sorghum bicolor
cgtccgtcgacccacgcgtccgtcgacccacgcgtccgcccacgcgtccggcagttaagaacacctagctaggaaaaatcccaagcagctgttgcaaccggttcctgcgaggagaaacaagcatgaggccccaggtggtgctgctcgtctcgctggctgtcttcgtcgtcctcgtagctctgccactcggcaaagcgaacgaggagaaggaggccgccgccgaaggggttgacgcgaggaggtggaggtggccgtgctgcgacgagtgcggcgtttgcccgaggtcgcagccgccgata

SEQ ID NO: 459894 - DNA, 362 bp, Sorghum bicolor
  unsure (1)..(362): unsure at all n locations
cgtccgaccacccgcaccacagacgagcacccgcgacgactgacaaggcgaggcgagcagtcggcggcgatgggcggcggcggcgcacatggcggcaccacctacaagggctacacaatcccgcacaacaagcgctggcacaccgtcgccggcaagggcctctgcgccgtgatgtggttctgggtcttctacagggctaagcaggacggtgccacgctcttgggtntgcgtcatccttgggatgggcatgatgaccactctcatggtcatggacatgggcatgaggcatcgtcatcgtcggcttcacattgacttcccctactcggggctgaacggtgattgaatgcttggcatgttccaac

SEQ ID NO: 459895 - DNA, 93 bp, Sorghum bicolor
  unsure (1)..(93): unsure at all n locations
cgtccgatcagagcctcgggcgcactcgacatacgtacaccgaatagtcctgacgggatcctgcgatnagaacgcaaggcggcacaggggggt

SEQ ID NO: 459896 - DNA, 450 bp, Sorghum bicolor
  unsure (1)..(450): unsure at all n locations
cgtccgaacaaccccaagttcttgtcttgttccgccctcgtccgggatcgctgctcctcgaatcgattcgattggttgatttcgtctcgaccttcaggttgacaaggaaaccatcgcgaattcatcacacaatttcagatgggttccaaagcgcctttatgtctcacgctcctcttgctgctgctcgtcgctgcctgcggacctgctgcagaggccaggcgtcttgtactacctgctgcgcaggccaacgatgctgttgaactcccagatcatggctcaaccttgaaggaacaaatttcttcaatgaagactcctgtccatcttaagagtagcggccaaatatgcttagcctgtgagaacttcatgagcgatgctgncaattatctcagtgagaaacagacacaagataaggtcatggaatttcttcatgacgctcgctctaaggcattc

SEQ ID NO: 459897 - DNA, 278 bp, Sorghum bicolor
cgttcgctcaatcctagcatctaagtgtggtgttgctgccctcttcattgcttctgtgcccttgcaatcgaatgcgcttcaatccagtgctgcttatcttgcaagtactttgtggattacacgtctaattcgcatagaattgatgtcagcaatgttttctttcttgcacatgtatagcaaaatcttaggattaaaacctagtgtataaaaacggcattacttatctctattatctagattatgtggtgccataatgctcatcattcacaagctgcatg

SEQ ID NO: 459898 - DNA, 502 bp, Sorghum bicolor
  unsure (1)..(502): unsure at all n locations
cgtccgtgttcatgagatttagagcatgtgctttaaatgcagttctggacatattaactgaatctcagcatcacattcttatgttgctgaatcctatcttgattgtggcttctgcaacatcctggaagaggaacttatgctcaactgagaccatactttcatctatctccaagaccgagagggcctaacgggaaacatcagatttcagcctccaattactctgattaacgagccagtctttgcaatacgggcaacgagggctagtattttaggtgcagcgcagttaacgtgtgtaagaagccctgtctgttgagaaaatggacaagaaatcgcagcctcatccagcatgaattaccaacaatggttgactacttgtacaaggagaccctaaaggatacgggtcgcctgtatgaatatggatgcgagccatataccgacgcctggcctnccaaagatgtgatgtgtgctttgcttagttcgatgatatgatattttgcttttg

SEQ ID NO: 459899 - DNA, 418 bp, Sorghum bicolor
cacgcacgcgcgcgccatcccccttccctcccgtcgcgcgccgtcgatccaatccacaaaaaccaaaaaatgccgtcgcccttcgccgccgccactttcaccagcgcagccgccagcgccgcgagggacgacatgtcctcggcggaggccccggtggcgatgatggggctggcgaacatggtgtcggtccccatggggctgatgggccgtattccggttggcggtccccgccgaatatgggctggcggcgccaacccccccggggtggggggccggcttcttcccgcgggccaccccgacccggtcggtctggagcgggtggtccgcctggttggggtccgcgggggtttcttccaatccacggtcaccttggagggcccggcgaccaccactccgtgggtcgcgctcaccgcggggg

SEQ ID NO: 459900 - DNA, 182 bp, Sorghum bicolor
cgtccgcccacgcgttcgtttcggcaccagcccagcccagccccagcggaggaaagagtgcggattgcggcgccaccggcggacgaaacaatggcgcctgcgagggacgagcacctggacgcgattcgcgcgctgatggcggtccactcgcctgcgctccacgcgctggtcgttccctccga

SEQ ID NO: 459901 - DNA, 135 bp, Sorghum bicolor
gcgttcgccacgcgtacggtacacatcataatggcactcgtatccttctgctcgtcctccaccagcgacgttggggctctccgaggagtgggcagcagcgcgcgtcgcacatgctgctactcgcatgacgctgat

SEQ ID NO: 459902 - DNA, 225 bp, Sorghum bicolor
cgtccgtgcactattggtgcactgtcgtggaggacatggaggacgatacatgaatctgcagagctcctaaaggcaacaaaggcagttattgttaatgatggcatgtattggctacttcttaatgaggcttcctcccatttgtgtcgagaaaatctgacgctcaacctgacagatgaaaaggtctaaaaattcccatccaaatgctgtaaaaaacatatttggaac

SEQ ID NO: 459903 - DNA, 275 bp, Sorghum bicolor
ggaaggacatacaagcggttagacagagatggtccacaaagaaagtcaattcaaggatgatgatgcacatgaatcttgacttgatgacagtgagaatgatgatggaaatgttcaacaagagcaaggtctctcaacttacgaaaaggagcgtcttgagatgcctgctaaaattgagcaaatggagaaagcttgccttgaacccagcacatggaccatgcaaggagagggttctggtttttagaggcccaaaaacagcggccctaaaaaggggacct

SEQ ID NO: 459904 - DNA, 101 bp, Sorghum bicolor
tcgaatccaggtcgaccacgcgtccgaaaaaaaaaaaaaaaaaaaaaaaaactaacggaaaaaaaaaaaaaaacaaaaaccctctactatcttaacgggcg

SEQ ID NO: 459905 - DNA, 237 bp, Sorghum bicolor
cgtccggaacaagaaaactcagaaatgaggaattcgaataatagtagatcccagtagtaaatcctccgccccctcccctgctggctgctgcacctgttcctctccctcgttccgccgtccaattccaaaccccatcgcgcacatcgccggtcaaagcaaaacactgaaacctcgattccaaatcgaaccccgagtccggactccggaggcttcgtttcaaatgcgcgaggcgcgtac

SEQ ID NO: 459906 - DNA, 177 bp, Sorghum bicolor
cgtccgcccacgcgtccggagaaatcataccttcatgtcctgtaagtgaaggtatataaattactgaatggagggatctgatagtggagtacatgttgcaaacccccctggcccttgcgatacattcttgatgtaattgagtactgatgtaatttgtacaacagcaattcaataatg

SEQ ID NO: 459907 - DNA, 218 bp, Sorghum bicolor
cgtccgcgtgagcaggattaggctccggcatatttcacggttcgtgcttacactcgttctcgaagaagaaatggctgatttcatcgaggaacggatgggggagacgcagcaaccttgacgctcaaatttatctatccaggctgctctttaagagaagttcactttgagttatttgttgaagtcctacctgttagacagtaagaggacattatccgttg

SEQ ID NO: 459908 - DNA, 125 bp, Sorghum bicolor
cgtccgcgtacacgcgcgctctcgcgcgggacacatctgaacccaaacacgaggagaggcatggcgggcgacaaatcgcacctggcattcgaatataggactatattctgcaataccgagataga

SEQ ID NO: 459909 - DNA, 500 bp, Sorghum bicolor
cgtccggaattccggtcaccacgcgtccgtgtagcataatgataaactaatcctacttgtaatcagcatatacaggcgcgccatgaaatgcgattacaacctacacgtccattacgctagctactaccacatcgatctgttcggcgggactgacaagccaaggaacacacaaagagctagctacagtctcgagaagctatgcttttcaagctatctaggatgtctatggtaaggatgatggacacgctggctctggactactcggtgccgaaccccttcagcatgttcggcacggccagggtcgtcgacacgggggtggccagcgacacgtgggcggtcggcaacacgtacatctagagccaggacaacgatgggggctacgtgttcagcggcgcgcatttcgtcagcgtgaggaatgaggacgtcactagggatgaggacgacggctattgtgcgtttcaatacgctaccagctcattgtctccagggaggagagcgtt

SEQ ID NO: 459910 - DNA, 421 bp, Sorghum bicolor
cgtccggttcgagcacctcatgcagccgtccaccggctcccccgcgttccgcggcgcgcaaccgacatcgtcgtcttcctcgccgttctacctcggcggcgccgaggacggccaccagagccaacctagccactcctctctgctccacggcaacaagcaggtctaccacggtctgatgcagctgccggagcagcatcagccggggagtaacaacggcctcctcaacctggggttcttctcgggcgggagcggcggacaggacgccccgctcgtgtttccagaccagttcaacggcgccatgggccggaaccttccgcgcgactgcagaaagcaccggaacagcggggcccacactgggtcaagggccatcttctcccggaacctaatgggaaaccaaatggcaagcagcgccggctttttt

SEQ ID NO: 459911 - DNA, 536 bp, Sorghum bicolor
cgtccgtttacattcttaccaatgctcctgtaaatgataccgaaatgacaactgaaggctactatctggccaggtgtagggctgagaagtcactggtggatagatggcagattgtgacgttacctgcgccggactgcaccattcaggatatggacatttttcatgataatttagttctctatcttcaaaagaatgggactcctcttttttgctccatcaatatgccaattgatgttgatgttcaggagccaaaggaacttgatgatctcaatccatggtttttccccataccgtcagagttatgcagcattgttgctggatccaacaatgattttatgtcatctacttatcggctagttgtttcatcacctgtggtacagcttttgcttatctatgtcaaacgtgattttgtgtaatatatttatttcagattatcattagacctccttttcttgagttccagcatctgatgggtcatttaacacttttagagcatatagcttagggaattccattgtaccactcacgctgctact

SEQ ID NO: 459912 - DNA, 383 bp, Sorghum bicolor
  unsure (1)..(383): unsure at all n locations
cgttcgcaaatacgtggagacacatctncttcttctacatatcgctgggcacaaggacatttttgatagctatccctatcttattcatttggtttaaggtgtatttttttaatttattcttttaacttctttttaaacttattcattatttatttcttccatgatttaattttttctttttttttctttcttttatctttcatttaccttctttattttttttattcttttattaatgtcttcattatatctttaatatttttttattttttttgctttcatttttttttttattcttttcattcaattttttcaattatttctttttaatttattcatattatttgattcattaaattcctttattttctttttttttattt

SEQ ID NO: 459913 - DNA, 159 bp, Sorghum bicolor
cgtccggactaactggctagcaatcgatgtactagatccaagatctctttcgctatcttgcaactaactacttgttatatggcgtcagctattttcaggtccacgaccgtggtgctacaactactggtctgtgaaaacccggtggtgctcaacttaatc

SEQ ID NO: 459914 - DNA, 344 bp, Sorghum bicolor
cgtccgccctcactccccgcgtcggcgatggccaaggcgctgctctcctcctccctcctccccgcgctgccccgcgccgccgggggcagcgcgagcaggccgctgctgctcccgccgctccgactgcggcgcggcggccggcgcgccgcctacgggtgcacggtgagggcaggactgcacgggctcgactccataggcggacacgacctccaggccaagctggagcgcgacgaggcagctatatacaagctagacgacacgtgcaataggaccatcaaccaacaaaaagacgagccttataacaacaaccggaatgagtactgaaggtgaccacgggcacatac

SEQ ID NO: 459915 - DNA, 303 bp, Sorghum bicolor
cgtccgataatggcaggcatatttgccgatgggcctgaaattgtgtccgatgggtgtagagaagtcatcggaagcttgtgcatggcaaaagagagtactgacctagcatgcgtaggacggatctaccatgttgattgccaagtgactgcatacaactacacagcgagtggctctttatacacatcctgtcggcaatggattgaatctggtcgctgcaagagaaccatcaatcgttgctggcatactgaagcattccacagccactgtgatgaacgcaatcattggcatgctctgtgcaggcta

SEQ ID NO: 459916 - DNA, 370 bp, Sorghum bicolor
cgtccggtgaggtgtcatgcaggtgcggcaggcaagcttcggcgtcgttgtcctcggctctccgccgcactgccaccaacagccaccgcgctgtcggtcggcaattcgtggtgatcaagagtgcttcagtgatcaagatcagagctttggcaactagtaagacaagcaggatcaacaagagcatttgaattaaggagaagtttacgcttgtgatcaaccagtcagttggatcctgtagagagaagttaatacccgaagtttggagttgtctatccgctgtttgctatcacaggtacaggtggagttctcttaattttggtgtggtctcgacgcctggtaaaagttgtctctgggaaggtaagataacaaa

SEQ ID NO: 459917 - DNA, 463 bp, Sorghum bicolor
cgtccgctcttcctcgcccaattccgggacgacaagacgcacagcatctacatagtagatctgtcaggtaacgtggtgaagcggatcgccggcgcagctggtggcccttaccaccggctgcaatgcacgcgcctggaccgtgcctgtctgactactgactggaacagatgccatgtgctcaatccggctaccggagctgtccaggccctgccggagagccccgcggcggagcatgtgaatcgggtcaacttgcgtgacccttacaccttctttgctcttgggcgggtctcctccacgggagactacaaggtgcttaggatgttcaacaggcttggctttgccaaaggcggtcaccagctctttgaggtgtttaccatcaacggtggcgacgcacatgcacggtggagagggcagcagagccctggcctctttgttgatgagtgcaatggtgttgtagttgatg

SEQ ID NO: 459918 - DNA, 422 bp, Sorghum bicolor
cgtccgggcaggagcaatgcttggagattcatttcttcatcagctgccacatgcttttggtggaggacactctcactcacatgatcatgagggtcatgatcatgctcacgagcatgcacatgcacactcactggaagatctttctgtggggttgtctatactatttggcattgtattgttttttatcgttgagaagattgtgaggtatgttgaagacaattctcaaaatgggactcatagcatgggtcacgggcaccatcatcataatcataaacggcatgattctagtgataaagctaaattgaatcaccaaaagagtgataccgatggtaaagacattgaccatactgaagaggaacctttggttgatggcgccactggaaaaataagtgatggccatgaatcaaaagctactatacgca

SEQ ID NO: 459919 - DNA, 370 bp, Sorghum bicolor
gcacgcgtgcgggaggcatgcgagagactcggcatggagctggccactctggctgactcctcgtggtgggaaaatggggcgcatgttatgcaacggcgggggggctatatcagatgtgcagggacatttgatcgcgcacaagtgccacactggcaagtgatccaacacccgccggatctgtaatctgaatggccagcaacacatcaccgtgcgaacggaaggctcaaagccgggtggggtatgtgcagccattaagaagcgtgatggctgcttacctagagcaggcgagcactgggatatctagcaagactccactgggtcctgccgacgcgcacagctcgagatcacttgtctgacgctagctagcatc

SEQ ID NO: 459920 - DNA, 422 bp, Sorghum bicolor
acgcgtccgaagactgatatgctcctactgataatccttaagatcttgctcatgacactttgaaggtgcatccacagcctgatcatgctatccaggtggagacagcatctgggatatcaatgtcaggacctcctactatcacatactctgagccggatactcttgacgtggataagcaggacacgcaccggtttgatcggtgcctccggcctgaacctgataggccctcagatgctaaaaatctgcaccaacatctgatgtttgatggatgaccccatagccaacaggatcctgaggctaactctaaaggcattatgtcggtatctgtacagcaaatcgaaatggatctttgactgacacacaggagtacattcttctagtatgcacctggccgtggggattcctcaaatgctatggaccaa

SEQ ID NO: 459921 - DNA, 317 bp, Sorghum bicolor
cgtccgatagaagccagtcaagactcaacagcgagttccagtagctgtagccgctcctgttgggatagccatctgtgtcggccatcatggacgatgtgaggagcaccctgcagcaccagggcggtcaggtccactataacgtcgccgcagatcaggtgtgagtgaaggacatgggacttctccacagcctcctatagccgtacactcacgcggaccaggacaagaagcaggatgaggagctggccaccggcatggagaatgccactgtggtcgtgccccactagtgatagaggaggagcacgtggacagctgcaaga

SEQ ID NO: 459922 - DNA, 502 bp, Sorghum bicolor
cgtccgagaagcaggaggacgcgacgaagacagccattgcgatgatgaagtgtgaagaagatgagtcctcttcggagtcaagcgagagcgattgcgaggacgaggcgaccatgaacgttgatcagcgcacaatgatctcaacagcggatcctgaagttgttgcatcaagcatcttagctgtctctgcgatggagtgtgataaggctgcaatgaaggccatgaagcagatggagaaggaacaaatgaaggccatgaagaagatggagaaggccgcgaagaaggccatgaagatggaaaaagaagcaaagaagatggcaatggctacgctgaatggctgcagggatgaagacgattcctcatgctcatcagagtccagcgaaagcgaatgtgaggggcaacttgtcaggatgagccggtgcgctacaatcaccacaccagaaatgccatcttcaaccacaagtcttcccattatagttcctcaaattccagcacctttggcacc

SEQ ID NO: 459923 - DNA, 491 bp, Sorghum bicolor
cgtccgatgattatgagtgcacattatgctttaagctattgtatgaacctgtcactacaccatgtgggcattcattttgtcgctggtgtatacgatcagtcaatggatcatggaaataagtgccccatgtgtcggacagtgctatttattggtccaaggacataccctttaagtgtaacattgagcaacataattcagagaacttttccacagtgaatatgctgagaggaggtcagaacatgagactatgacatatgccggtgttgattagatgcctctctttgatatggacgttgtacttccatcccaaaagatggcactgaacatatttgaacctcgctacagactgatggctcggagaataatggaagggaaccaatggatgggaatgggtactattgattcagtaacgggtactggagcagattagggctgtgaggtgtaaattttggagtgtgaaacacttccggatgggcgcttttatttagagg

SEQ ID NO: 459924 - DNA, 437 bp, Sorghum bicolor
cgtccgcttgacacataatgttttactcatattctgctcaattcttaactggtaaagttatgctttttacttgctacttataatatttaagcactaggatttgcaattgtgttgtttaagtaaaacaggaattgatttcactattaataccttcgcccttttcggattacgcaatcatcctttattttcctagataccacttgcagtgtctagtacctttttgatactatgtcagtattatttattatgatctgagcaggttgctcttgcatctgggaataaaaggaacattgaaaaagttagaaatgctcagtttagtgttaacctgcccaatgtggtaactgtcgatccgatgggtatggcattgaacgaagacaacctgcatcttgcaccgagtcaaaagtgagcttggcaaatgcttgagagccacatatgac

SEQ ID NO: 459925 - DNA, 409 bp, Sorghum bicolor
cgtccggcccacggagcataaccaccgtaccgaggaagctgagctcggcccgcaggattcagaatcttcgaggcgcggcgacaggcggtcggggacataggaggcccaggagctcacccaactggggctctacgtgacatagccggctaactaatcggcacgctgtggcacgtgatagatctttcgctgacaaagcaagaatccagaatctggtagtccctatggcacgggcagcacttgcaccctcgaagggggtgcgcttgatacgacagccaacaaaactacttctgggctagagactcaatgttacgtggacaaatcccggtgacaggggcatccatacctggtctttttgtataatggccaaagctaaaagaccagagaccaacgctatggactggtccaaggg

SEQ ID NO: 459926 - DNA, 433 bp, Sorghum bicolor
cgtccgcaaaatccggtgaggttatcaactaccaagccttcacaaactctaagggcatgtatactgttgccgagactatgccagagagtgacaggtgggactcgtgcttggcaaggcctatcagcagtttccatctgcattgcacacggaggggtgatgctcactctggggtaaagttcacttacaacaaaccatctgggaactctcacactgtcaagactttcctctacaagccagccaccgcccctctgtattgtagctaaacagttccatcacattttgttggaaggcaaaatatagaaacataacaggaaggacactgtttccgttgtaaatcaaagattcagttgtcaatgggaatgtgttgtcctagtgtctggttacccatacctgcaaggaaacagatgttgtgcgcttcatatgttgataaatc

SEQ ID NO: 459927 - DNA, 487 bp, Sorghum bicolor
cgtccggcctaggtccccgtagtgtgccatagcggcagcagccagcagccagcgagatgaacaagaagagcgtggttctgtacccgggcctcggcgtcggccacctgacgccgatgatcgagctggccaagctgttcacccagcacggcgtcgccgtcacggtcgcgctcgtcgagccgcccgccaagtcccctgacttctccacggcggtcgcccgcgccgcggcctccaatccgcgcgtcaccttccacgtcctgccgccgcctgaccccgccgattccagctcggatggtggcacgccgtcgcaccacgtcgaccagatgttcagctacctcaaggccatgaacgcgccgctgcgcgacctactacgctcgctgccggccgtcgacgcgctcgtcgtcgacatgttctgccgcgacgcgctcggcgtcgctgccgagctcaacctggccgtctactacttctacgcctttggcgccagcgcgct

SEQ ID NO: 459928 - DNA, 351 bp, Sorghum bicolor
cgtccgctgtggtttcatctttgctgggttgtttgtggctttggtcatgctggtgctgagattgaggactgagctgaggaataacggtgcagcttggtcctggagaccgatggactccggtgaagggaaactggccagagcatatcaacttgtgcctagtaagacagactattgaatagtgcaaactgaacatctttgaggagtgacaaactgcggctgttgtatgtacctaatcacataatacttttatgaagttgtaagtattgtagttttatcacctctctaaaagtattgtagttttgcatcatcactcctttcatgcttgaactttgtgatctccgtgctttgctc

SEQ ID NO: 459929 - DNA, 498 bp, Sorghum bicolor
  unsure (1)..(498): unsure at all n locations
cgtccgtagagaacttctgcaagtccaatgatgtcccagtttaccggcgcgatccagatgatggcattgacaatattggcaagacaggtggaaaccatgccgtttctggacttaagttccgcatattgagggaatttttgcagcttggatacagtgttctcctctctgatattgatatcattttcttccaaaatccatttgatcatctttacagagattctgacgtagaatccatgagtgatggacacaacaatatgacagcttatggattcaacgatgtgtttgatgagccatcaatgggctgggcaagatatgcacatacaatgcgtatatgggtttataattccggattttttttcataaggccgacaattccttcgattgagcttcttgatagggttgcttaccgcctttctcacgagcccaaatcatgggaccaagcagttntcaatgaggagctgtttttcccctcacatcctggttatgaaggtcttcatg

SEQ ID NO: 459930 - DNA, 225 bp, Sorghum bicolor
accacctaacggacacactgcacaattactatgactggttgcagtgtaacacaccagggacattaccacatcacatagaatgatgaacgctaagccaaataccgactgagcaagacgaccgtttttaatagtttactcgatatatccaacattcaaagggtttgtactagaccaattccaaggccacaattcttgatgtaggctgctggagggctcaccattcac

SEQ ID NO: 459931 - DNA, 387 bp, Sorghum bicolor
ctgtccgacgcgtccaccaccaccaggagcgagtacggacaagaccaataatggcgctgagcatacccaccatcttctagtaccacgggctggcctcctcgacggcgccgacatgccggccggctgggttcttggcggttggcaccagcagcagctgggccgcgggagcccagcacaagaggagcctgatgctggcgactacgacaactacagccttctagacgaggggagctggagtcctatcgccggcgaggtccagcgggatcgagacttagacctccgtgggagctgaggccgcaaccgagcacgtcacggaggccagacaggacaccttgtggcccatatgtgaggcctactgcgacaaggtcgttgcactagtcatgtaca

SEQ ID NO: 459932 - DNA, 470 bp, Sorghum bicolor
cgtccgctttttgcgttcacctttctttatttgtctcttttttggcagaaaccacttgagatatattcatatatcatgttcacaaactatggactcctagagcacaaggccgaatgcataacttccttgtctattccattattatccactacctggatgcactaagtataattatatacatcggcatcgtgtaactggatcatgaacgtgcatgttgttattaagtacagctattcgagcaaattagaacaacatcgatcattgcgtactgaaacataagggaggcttttagactttagagagggaagatagtgtcgccatcctcgtttctgtcaaggtagttgaatggagcatccccttcgtaacggaagtctggaccagcctagcacttcatcggatgcaacaggctcatgttatttagctacctgctgaacacattgcaaccacagcactgaacaaacacagttcca

SEQ ID NO: 459933 - DNA, 339 bp, Sorghum bicolor
cgtccggccacgcctaccgtgacgcatggtgagatcgagtcacgatatccggatgagtgcacggatcggggtgttatggtatgccaccgagatccctaaagagagcagcacgtttagagatgtcgacaccgaaggggtctgtagggcgatcatgcagtataaccccttgctcaaccctcgttcctaccacttcaacagggacctgtatggtcggtgccttcctgaatcatggcaggaccgctacttatgtctattccgatttcgagggaacataagacgcttacaatctgggggatctgggagccatagtgacggagctggccaatatcgacgatattc

SEQ ID NO: 459934 - DNA, 240 bp, Sorghum bicolor
atcccggtcgacccacgcgtccgcactagtcccatctacgattgagcgtttcggcatcgacaccacctgcaccttcatcggcctccgatccctgcacgagcctattgtggaattccaggatctgcggcggccagcagtggtccgtcggcgatggctcacctgctggacaactggtacagactacctattcaagagcgcgctcattggtgacttcagcgattgcgagggacacatctgcct

SEQ ID NO: 459935 - DNA, 360 bp, Sorghum bicolor
gggtagtgttttttattttattgttccgggcgggattcccccttgtttgaaagggttccgggcttcccttttaagctccaatccgagaaaccttttgtttttacaaaacaacttaaccccacccccttccttttgggggttttttaccctttctaaatcccaaaaaaacacttccccccaccccctgggagaccctcttgtccatcaacacaggtcatgttacccacgcgcacagttttccttattaatcataaggttggaggaccggaccattaccctactttttttcctccccaataataaaccttccgttcccagggttgttgggggccaccaacaaaaagaggtcctttaaaataa

SEQ ID NO: 459936 - DNA, 439 bp, Sorghum bicolor
  unsure (1)..(439): unsure at all n locations
cgtccgcctgcatggtgaccgcagcagcagcagcctcagcctctccgcgcagcatgctctgcttcgcattgaccgcctcgccgtccggccgccgcgagccttgccgctgccaccaccgaacgtgactcgtccgccgtccgtccgtccgtcaccagcggatcgatcgatcgccctcgacgctctgcagccggccggcgctcgcggtcgcggtcgcggcacgcgcgatgcctcctctgcaggcgccgccgcacggcgagaagagcagcagctccggcggcggcggcggcaggcatcagcggcaggggatggcgggggcggcgtntcagcagcggtcggcgttgntccacgggcgcgggacggagcagcagcggcacctgcagccgctccagaggcagaggcccaagacgctgcctgacgtgctcgccggcgttaggggagc

SEQ ID NO: 459937 - DNA, 439 bp, Sorghum bicolor
cgtccgggacaatgtgactcgacaggacaatgcttcaactgagactgcgcagtcactgtgttaaatgaatcttgcagagctgaacaagagagggctgatgcctgctcaagacctgcgtgcgacacatctactgatccatctgtttctggagttaatagggccatgcctgatttttccatatttagaggagatgtctgttcggatgatcttactattatagaactttaggaggcatgtacagccacatttggccggcaaactactgtcaaagacaagagatggatgaaacgaccgctgacaatgggcttgactaactcatacgatgttgctagctcacgttgtgtccgtaaagactacaaagttgctggcacggatgcctaaaaagacatatcatacatggatgaaagatctaagatggtgctcccagctacctctatag

SEQ ID NO: 459938 - DNA, 533 bp, Sorghum bicolor
  unsure (1)..(533): unsure at all n locations
cgtgcggtgaaaagcaagataagggtataagaggacacctttactggcctgatggcacagtcaagaggcgtacaatgtcagaaaaaactgagaaatctgaaatgcgtcaacttgttcaagctttagttgacaagtataatgaggaccataatcttttcgaggatcttgcacacgaactcaaagacgttttacactaccagtcaattattgagaacctgaatttgtactatcatttcaatttcaaaacaaagattaaaggggctggtccaaatgaattgagcatggacaatcttttctttgtggaagtgaaatttatcggaaaaggaaagcttatagaactgcaggctaactgtttctgcgcagttaatccggatgacaatggtccctgctttggttgcaccaaacatggagatgttggtatgaagcaccctagcagttctgttggatacactgctggtcactcgaatgtgggtttgccatttggattcattgcanagtggaagagggactatgaggatgaggaggatgatgat

SEQ ID NO: 459939 - DNA, 514 bp, Sorghum bicolor
  unsure (1)..(514): unsure at all n locations
cgtccgtatctatctatctcgctctcgctctctctatcctatttttgtttccctcagatttcccaattaatttggttcctcaactagggtttggatagtggttgctgatgattgcatttcccggcatggcaggttcgttcctggcaccaacgttgcggaagaaaatgatctatccatgaactgataaggctttgaatgttggtgaatggtgaccttctggaattggagcgatctgtttatgttcattgtgtgcagttcagatgcaactactgaaaagcgtcacatagatccagagtcacgagctgctaatgcttggaatgagtccttgaaccattcacaaaatatctatatttgcaggcaagtcaaagaaaaatccctattntgattgatgccgcaagaaagagggagcagctggatgagcttctcaattttgcatcttacattgtatggtctgcaaaagttcctcaatcttgcggtagttctgaacctgcatgctaccatatgggagtaggag

SEQ ID NO: 459940 - DNA, 481 bp, Sorghum bicolor
cgtccggtctcgttctatacctcgagcgcgacccacggttctaacgaccgttcgcacacataagacgactgcgtttgtctacattactatgggtggagaccttccaagacgatcttgagttgagcaccataacataataacactgacgatcactgcccatgacaaagtcactacccctcacaagatttagtacaagaccacgacatgggcactagcaccatatccagcccatggatgaccgccaacttattccattttcccgagcccgggctatctatagtttagccctcatcatgatcattattatcctggggctgaacgccgacctgacatgcctagcgttccgatgagtgtactcataaacaggcacccactctttcggctccgctggcatacactcgacctacggctgcgcgaacccatgggcgactcgctatgggaggatcgcggttaggtcttggcctccaggctagacccgatt

SEQ ID NO: 459941 - DNA, 422 bp, Sorghum bicolor
cgtccggtgactcgtgtgacaggtttggaccacaacatggctcttgggcggattattgagagaatgaaaggtacaaaactgcggtgataggaacgatatcatgtggggtcacacactcatccaccctggacggtgacatgaatcatgccacagtaaacacttccacaggggggagaggccgacgccgagccttgagggtgatgatgagcggattaacggcgaatgaagctctagtgggatgaagcggggtgctgtactcatcaaagtgagaaagctgtcacacggctctctgagctgctaccgatgctagtgacacatattttgattgggtgctgggaaccgacggggaacataagactacatagtcgggcactgatgtggttgatacgatgggaaagagggactgagaggctgactgcaag

SEQ ID NO: 459942 - DNA, 260 bp, Sorghum bicolor
cgtccggttggaagtacatcagaacaagttgaacgatttacaactcgcacttgctgctgcagtagcagaaaaggaggaggcatctgaagagattcattcactgcgtaaaacgctcgatcgaatgatcggacgcaaagcataattagaaatacaggtatcttgtactatacaagagcacgaataactgaagagcaagtgccaaaatacaatggtagacaagcagatgtcgagtgataaatatgtaaccacatagaaagagc

SEQ ID NO: 459943 - DNA, 126 bp, Sorghum bicolor
cgtccgggcctgcatcaagtattatcaggccttctcaacgaagctgagctacgaacgtacttatgtttctagtctcgataccacgctggcggcgttacggacgtctcctggctgaaggagcttgaa

SEQ ID NO: 459944 - DNA, 491 bp, Sorghum bicolor
  unsure (1)..(491): unsure at all n locations
cgtgcggcctcctcgttcgaccaccttaccgctgtgctacctcgcttcagtcctatctcgacggccggccaatataacaacaggaaggggggattctgatctcatcgtcgatctcatggcgacgacggagatggagatgggcatgggcgtcgtcgtcggcggcggcagtaacagtaacaatggaggaggcagcagcagcagcagcgggctggtggtgacggagctgagccacatcaaggagctggtgaggcagctggaggtgcacctcggcggctccccggacctctgcaagcacctggcctggcagatcttctccctcaccgagcgctccatcggcctcatcacctcctccaacctcgacgccggcgccgcccgccggaagcggtccgcgggcgacgccgccgggctcgcctccccactctccgngacgcccaccagcgacgtcacggacgggccgttcaagaacaacaccaataagaggaaggtgatgg

SEQ ID NO: 459945 - DNA, 464 bp, Sorghum bicolor
cgtccgaatcaatcttcacagaggcctaacgatgtgtgggtaactgtttctgatattgctctagtgacactacctacaagtgcgccggctgctttacggcctgcacctgcacttgctgctaagaaaccacctactgaatgtgcaactagtgaagcatatgctcatcatcataactaaggctgccatcactccggatgttcaaacacttctaaaacatcccacattgatgaatcggaagattttttcatggcaaagcctgctaatttcggcagtggtcatacacaagttctgaagcgtgcaagaaatgggcattatccatctgcagctactgcaaggttcatggactggactgagatgggacactctaaagggggaaaccacagggcatttgattctatgttcactagcaatcaagatcgacagccggaaatagattagaaagctgaagcctgtgctcatgaaat

SEQ ID NO: 459946 - DNA, 65 bp, Sorghum bicolor
cgtccggccagaggacttcgccaagtaccaggcctacgagctgatccatgccagatgggccatgc

SEQ ID NO: 459947 - DNA, 350 bp, Sorghum bicolor
cgaccgcacgcgtgcgcccacgcgtccggcgtgctgggcacgcgctggaggcacctctggcgctccgtgccgtgcctcgacgtcgacctggatgagtgtcagggctgtgccgaagccttccaacaaccctgaccctgatgttgacaactctgatgttgaattcgacgaagaagacgatgactcggacgacggcaacaacgaagaaaccaagaacaatgagtgggacaactttgaggattttgctgatagcctgatgcaccactgcaacatcgctcagttggattccttgaggctgcatgtgagtaagagcaaggcacctagtttcgccgataaacaagcaggccgatggc

SEQ ID NO: 459948 - DNA, 178 bp, Sorghum bicolor
cgtccgcacgcgtgcggcatggctggatcagcttatttatagtctggaccatagagatcaccagctacgttaactatgaaacccactgcactagcatgaggtcgatcgatcctgctaacacactaaaagagaagactctactagagcaagcgcacgcacggtacacacccatgctaga

SEQ ID NO: 459949 - DNA, 310 bp, Sorghum bicolor
  unsure (1)..(310): unsure at all n locations
cgtccggacggacaaggcgtcgatgctggacgaggtgatcgactacctgaagcagctgcaggcgcaggtgcaggtgatgagccggatgagcagcatgatgatgcccatgggcatggccatgccgcagctccaccagatgtccgtgatggcccagatggcgcagatggcccagatggcgcaacatggccaggcatgatgaacatggctcctgccagccggtcgcggctacccgccatatgaccgcgcacgtcgccatgtcggcgactgcgtgagcaccactccgcgcggcggcngnagagcgcgcgctctc

SEQ ID NO: 459950 - DNA, 265 bp, Sorghum bicolor
  unsure (1)..(265): unsure at all n locations
cgtccgaccagatcttgttgattttgctgagttaaattcaaatgctgctcctgcaaaaaaagagcaatggaccaggaaggtcactcttgtgcttgatttggatgaaacccttgttcattcaactatggagcattgtgatgacgctgatttcacatttcctgtgttctatgatatgaaagagcatgtggtatatgtgaaaaagaggccacatgtccacatgttccttcaaaggatggtngaaatgttngaggtagtgatatttaca

SEQ ID NO: 459951 - DNA, 54 bp, Sorghum bicolor
cgtccgaaaaaaaaaattttaataaattaataatcaaaaaaataaatactttat

SEQ ID NO: 459952 - DNA, 244 bp, Sorghum bicolor
cgtccgctctatgtcatcaaggaaaagattcaccagaacacacacacacttccactattggagatacggcatgcacctacgtcatagaactccaggcttctacgtaaaacacgagggcgtcaagaaggacatacacgccaaggtccaaatggaactcattatagacaccggagagcactacatattcacctactattagaagcataataaaagcctgcacgaccaaatatagcttataaattaa

SEQ ID NO: 459953 - DNA, 471 bp, Sorghum bicolor
cgtccggtcgctggagcgcagactgctgctgctactgttggagagcaggctgctgcagatgatcttgtggaaggtactaatcaccatgtggtatttatgggaagccaaaaatgacataagatttcagagaaaggactggagtcgagtccttggtaggtacattcatgcgatggaggcacacatcactactcaccaggtttcgctacaaacccactctaccgataacaactacatacatcagggttctcctacccctgtccaaggtacacatcctttcccctgcagaccaaatcgtcgcctcacacacaccaaccagcaacaacttcagcacacaggcgagtgccccaggcagtctgcaatgcaagaaccatggccacaccaacacaacaaatgcaatcagatggggatccaatggaagacagattcttggtccgcactccaggactgcttcaaggtgtaaatgctacattg

SEQ ID NO: 459954 - DNA, 384 bp, Sorghum bicolor
cgtccggtagatagtcattttgatgtatctgtatgactgacattgtaaagctcaaccatacattggtgggcacataatttgcatgttaatttttcacagtttcgtccacacaaattactactattcttttgatgcaacagcacggctccttgcctagattatcatagtggatatcaatatcataaagaaatagccagacattgttatgaatagctgaaacaataataggacattttctgaatgacttcttcacatgtagtggtgagacgaagtatttatagggaagcttcttcgcatgaaggataggcacaatcatattgctaatgcaatagcttgcactgggagtctgagattatgcattatcagaagatgggatgatatcta

SEQ ID NO: 459955 - DNA, 90 bp, Sorghum bicolor
cgttcggactttctcccatcgagctagctagtcagctggtcccgttgccatggggaaggagaaggttcacatcaacatcgtggtcattga

SEQ ID NO: 459956 - DNA, 344 bp, Sorghum bicolor
cgtgcggagaatggggaaacattagctgatcatccaaaaaaagaggaaggtgacctccaaaaggacactggcaccatagttcaacattgtgatgcccttgcttgtgatagggagtctgtgtgttcaagttgtgaagaaccgagatatggattaaatggcgagccatcagacttgagctcggaatcatactcaggactgaccccaacacttaatacgggtggcaaattgccgatggtttccgaagaccctgtgaataatctagagccaaatatgactgatggggtgacaagtgatagcacgtaccgggagctgaatcctgaagtcagcactaggaatgaaatgga

SEQ ID NO: 459957 - DNA, 529 bp, Sorghum bicolor
cgtccggaaaaaaaattgtatccctccttctgaaattatatatattaattgacatcttgttcattaaaaaaaataaacaatttctttttggcttcactggagattctataaaacattattagttcaagaattatgcatttggattcaaattctatttgtagctacacagtttataatgaagcattgtaaattactctcttattgtgctgaatttacattgcatatatgggtgtaatttgcacatgtgcgcattgtaattcggtatacttgcagtataatttttacccatctattcctgtcagtctaatcatttttctgtgagtttctgatttattcctgattttgcactatgctctctgtgcttctagccttttagaccacatcacaacctcccaagtgctggatctgcttcttgtgcacagtgagcaaccagagccatgccctgcttgtgaagcaagcacaagcaacagtctcattttgccatcctgactggtttatagctcccatgattacagattccatggatcta

SEQ ID NO: 459958 - DNA, 502 bp, Sorghum bicolor
cgtccggcacgcacccgcccgccgctgctcctccggcagcgtcgccaccgccacgcgcccacccgcaacccgcccgaacggccggccagcgctgtctggtattagtggtactagtatctatcaaatcagccatctgccctctgccctcctatccaaaatcaagtccatttccatttccctttcctctctaccctcactctcgtctccggcgggcggtggtctcactcacctccctttccccgtcgccccctgatggctccctcggcagctctcgctccggcggccttccgctccgccttctcgacgccgctcgcgtccaaccctacccgtaatagaataaacatagaaggtgctttctgtttgccttgttccacaaggaagagagctagttatagaccttttcgagtgtacagtttatttggagggaagaaggataaagatgagaacggtgatgagccatcgaaagcaggaatttttggaaatatgcaaaatctatatgaaa

SEQ ID NO: 459959 - DNA, 262 bp, Sorghum bicolor
  unsure (1)..(262): unsure at all n locations
cgtccgacggctacaagccgggggacctttcctgtctgaaactggaagcgagcacatcaggaaaaatggcagcgccacctctcggcctcgcctgcgagggtcgccggggccttcaccacaccggcggtggcgcattccggtttccgcccccgacgtctcggccctggtctcctcccttcaaagagatggagcggggtggtgaggatgggggcggtggtcngaggaaggcatgagggtgtggaggtcttggagcttatgcata

SEQ ID NO: 459960 - DNA, 72 bp, Sorghum bicolor
cgtccggcgaccgagagaggcctacgcgcaccagcagatcccaagctcaccggggaggaggaggggagaggg

SEQ ID NO: 459961 - DNA, 354 bp, Sorghum bicolor
cgtccggtcagatggaaagaacagaatcctcaacattcagcctgtgaagttgcaccagaggctgcccttgttcttagggagcatagatgacatgcttgagctggaaagctatggagatgtgcagcagaaggttaatcctggatatgaagtttaacgatatgtaaaaagcttcagatttttcaggtgccgaagcatacaataaggtaacagacgtgtggcaaccctatatttgcatacaataaggtagcccaccacaacttgcttgggactaaacgcttcgttgttgttctcttttctgccaaaatttgctgtacctttgagtgaagtattatgattttttttggcagcttagat

SEQ ID NO: 459962 - DNA, 289 bp, Sorghum bicolor
acgcgtccgcgctcagctaggcggccgtacatggcgttcttgacgccttttttcgtcctcgcgaccggcgacagggacgttcatctcgtcgcgacgtcgtcttccttcgaggtactggtgacgcatcgccaagcgcgtgtgagttgaggcacacattaagtggtgcgtgcagaacgtaagcgacgttcgaatctcacttgtaggtcactacaacaaactataggccatatagcttacgcgcatgaccatcaacaaacacaacagcatgaccaacgcgacgctggagttc

SEQ ID NO: 459963 - DNA, 492 bp, Sorghum bicolor
cgtccggccataaagcgtgaagttggagtagttggtgctaggcaaaggccatctaatagtgcagcaacaaccacatctgcttctaatggcttagtcaaagtggtttcagcaccaaaggttagcccacatttggagtggaagcccaaatcagtaagccccagctctatcagtcatgcagttactgctgcacctcctgctgctccatcacctgttgatgatggaagtaaaacagaagtgtctgctttgtctaagaagctttcacatgctaatgtatcacatgaacatgtcattataccggagcacatcaggataccagattccgaaagaactcatttcatcttcggttcttttgaatctgaaattgatccaaaggcttctttaacagcctcttgtgatattgtggctaaagaagaactgaatgatcactccccttcaagtccacttccacagtcagagtctgctggttcagtttctgaacatcagcaatcattg

SEQ ID NO: 459964 - DNA, 370 bp, Sorghum bicolor
cgtccgcccacgcgtccggagctactcagccaagatgaaaaggtggctccaagcactggccctctaggaaatgatgaagatgcacagatggaagaggctgctgctgcacagagagagctaagcactgaagttgatcatggtagtgaaaatgtgaaacttggtgaagctggcacggagctgcagttgccaccaccttcatctggtgaggcactggtagacatatctagggagcaactcagccaagaggtgcaggaagttgcaagctctgggccctcaggaactgatgaaaatactgagatggaacggctaaacaccgaacattcacctggtggtaaaacctcaaaacttgttggagctgatccgggaatgc

SEQ ID NO: 459965 - DNA, 313 bp, Sorghum bicolor
cgtccggtcatggcatagctggaacacggagggaaatagcaagtgggagataaacaggaagaccgagctaggtgattactacaagtagcagtacaaggaagagagtcaatctgcccgtgacctcgagtgaattagttgggtgtggagtttgttgaggtcacgatgatgggaggcgggctgatgatggatcagagcgtggtgttccctggcgtccacaacttcgtggatctccttcagcaaaacggtgacaagaaccttggcttcgggtcgctgatgccgcagacgtccttcggcgaccagtgcgtgatggggg

SEQ ID NO: 459966 - DNA, 479 bp, Sorghum bicolor
cgtccgaaaacacagaattacttaacagtaggctgaagaggaagcgccgaaagatgaggctgagatctaagtaagctggtgtatattgatgtgtttgtgggttattttttgataatgttttttttttttagtatttttttttaaatatttatttattttttttttatttaatttatcatttttttatttttgtttattttattattttttttttttgtgtttttattgttttgtttttatttctattatttttatattttctatttttttgtttttatttttatgtttttttttttttatttattttttatttattttatttttgattttttatttttaatttttttttttttttaattttggtttttttatttattattattatatatttatggttgtatatatttaaatattattatttttatattgttatataatattattttttatctatttattatgttatttatattttattt

SEQ ID NO: 459967 - DNA, 139 bp, Sorghum bicolor
ccacgcgtccgaaacaagtctcatatctgtcacttctactattgctacaatccaacactttccttcattctgcatgttttatcaagcatgtttaaacaagtcttcgcgttcaatctattaaaaatcatatcattatttt

SEQ ID NO: 459968 - DNA, 370 bp, Sorghum bicolor
  unsure (1)..(370): unsure at all n locations
cgtccgacgcgccagcgtcggtgacgactggcagaagaagccgtggtcctccgtcggggccaagcgcgctctggacgacaccaggagcgaggcctccgggaccagctcgacggccaccgccggagacctacaccacgaccatgaccacgacgccgtaccggctaccaaggcgcaagtcgtacgctggccggcggcgagggcgtacaggaagaacaccttacatgctgcagacgctgtcgacaaaaaggccgaccagcatcatcatggacgaggggtgtgtccttgaagtgcccngtgttctagatgaagttattcttgtgggtggatccacccgaatccctgcggttcaagaacttgtgaggaagcttac

SEQ ID NO: 459969 - DNA, 382 bp, Sorghum bicolor
  unsure (1)..(382): unsure at all n locations
cgtccgtctcccccccgactgagatcactgcgcgtgccgtcggcgccatggccgcgccaccgccgccgtcgccagccaaaacccactagcagcgcgtcgcgggtgcacctgctgccgatctaggaagcagggatttcttcgcgccctgcgctgtagaaacgggcctggatttgctcgagagcgagaggagggggtaatagagtgaaaggaggcgcggngagaagatggctgcggaaatggtgaaggcagcgacgagcgacaagctcaaggagatggattgggcaaagaacatcgaaatctgcgagctcgtggcgcaggatcctgggaaagcgaaggatgtgatcaagttcataaaaaagtctatagggagcaggagcaagag

SEQ ID NO: 459970 - DNA, 182 bp, Sorghum bicolor
acccacgcgtacgcgacgggttcaatctgtattgcccacgatcgacaatgtcatataagacgatcagatcttcttgaatataattggcgcaccatgctgaggatgcattgtaatgaccgtgtacggtgcatgcatttatgaaagcgacagttggtattcaaagcgtttgaagatcatgctca

SEQ ID NO: 459971 - DNA, 196 bp, Sorghum bicolor
  unsure (1)..(196): unsure at all n locations
cgtccggccgacggcaacttcgtggcgccattcgacgtcgacgacatcgacatctactccggcgagagctactccgtgctgctgacgacggaccagcgagcgtcgtcgtcgtcgtactggatctccgtcagtgtgagagggcngccgcccaagacacctgcggcgctggccatactaaactacaccaacagcaagc

SEQ ID NO: 459972 - DNA, 255 bp, Sorghum bicolor
  unsure (1)..(255): unsure at all n locations
cgtccgagaacgttcacgtgagcccaatagacaagcatgttaaagtcggtattcttggaaatgctgctgattttcatgacaatgatcctagcagtagtacaacagcaattaacaatgacaggcggaaaatgatgatagcctntgatatgagatgtgttggcttcatcatggcaaagatggttttgagagagctaatggattcttcaactttctttaaattaaaatcattcctgacaaaaggaaaatgacccatct

SEQ ID NO: 459973 - DNA, 96 bp, Sorghum bicolor
gttcgtgggatggatcctgacttccaccgtgacccacggttcgggatcatggaggcgatcttcgacgtgatgcctcatgtgatgtgacggatgaac

SEQ ID NO: 459974 - DNA, 63 bp, Sorghum bicolor
cggcgcgtcgcgccgcgcaacctgtcgcacggcacgattctcttctctctcgcgcgcacacac

SEQ ID NO: 459975 - DNA, 361 bp, Sorghum bicolor
  unsure (1)..(361): unsure at all n locations
cgtccgggaggcgtacaataggatggtggcgctgtaccagaagatgaaccagctgcagcagagcgagcccagcagcaacccgtccaagcagtgagcatgacattttttttcttcttctcgacgactgatgagcacggaatcgtgtaactaatggaggttgaaatccgtcgacgcggtacctgtagcatcatgtatttatcttgtgtttgaccggtctatagccttgtataaggggtgtttggttggtgatatggcgtactttcgtcttatttgacaattactgtcctatcatggactaattaagcttgaaagaattatctcgttaaaaaaaaaaannaaaaaaaaaaaaaaaatataaaaa

SEQ ID NO: 459976 - DNA, 71 bp, Sorghum bicolor
catgtcggcgctcgacatgatgatgatagtgtcgcgatgctagcgcatcgcgcgccgatgatttgtgatgc

SEQ ID NO: 459977 - DNA, 200 bp, Sorghum bicolor
tcccgtcgctctcgtctcgtcctcgtctaccgccgagcccggcccttccgttcccgacccaccggcctccatcttgcgttctgcgcgccgcgtctcttgccggcggggcccggcgcggcggtgaccccagcccaggacacgagtggggccgagcccgaggcggtccgtgcacgagcacggggcgagcctgagcccgagca

SEQ ID NO: 459978 - DNA, 319 bp, Sorghum bicolor
  unsure (1)..(319): unsure at all n locations
cgtccggcagtggtcttgatgaatgatgatacgtttaacctatttgctgttaactcattcttaattgttctgcttacgaaggctctgtttgtgagcgtgtggcatggccttctttgcttcagccttcagctagagtctagagattgtggattctagctcttctaacacgtaatagcnttttaacctacaataaattgcacaatccagcttgcacagattctagaatccaacaatctgctcaaatatagagtttatatgattntggcacactatananagagagagagagagagagagagagagagagagggagattcat

SEQ ID NO: 459979 - DNA, 114 bp, Sorghum bicolor
  unsure (1)..(114): unsure at all n locations
tttntattaataatattctaaatatatagcatcaattaataatataatgatagtcgttgtcccaaaattaagtatgaagagtacgtcgtagtagtagagagtgcattgtacatg

SEQ ID NO: 459980 - DNA, 130 bp, Sorghum bicolor
  unsure (1)..(130): unsure at all n locations
ctcgtacaacgaccaaccatcgctgggccggtctgccatcaaggctaactgcgcgctaacggcgcgcaccaggcgcatcgcgagccggcctctgtcctgcccgctaccgtncgcccgtcgcccatgcgct

SEQ ID NO: 459981 - DNA, 133 bp, Sorghum bicolor
cgtccgcgctgagcctggtgggcccggaggccgcgggtctcggcccgcgccggctcgtcgcggcggcacccccgcgggcgttcttcttctcgtgcgcgtactaccagccgccggcccagcagcagccggaggg

SEQ ID NO: 459982 - DNA, 178 bp, Sorghum bicolor
cgtccgctttccttatccccttcctttcctctcccttccttccttccttccttccttcgccatggcaaccatgtccctccgctccctcgccatggccatggccgacacggccctcccgccggcccacaagctcctccccacggtgtccctcccgctcctttcctcatccacgcacgcc

SEQ ID NO: 459983 - DNA, 119 bp, Sorghum bicolor
ccggtcgaccacgcgtacggcattagcagcagcagctagcaaccggtccaacactctcacgctcgcagagtttgctcagcaatggccgcctccaccatgtcgatctcctgcacggcgat

SEQ ID NO: 459984 - DNA, 309 bp, Sorghum bicolor
  unsure (1)..(309): unsure at all n locations
cgtccggccgccctcgactatggtcttgtctttgctcgaaggtccattataaccacggaccagtaatgattccttttcccgtggataatagaatgatgtcgcagttattatgaaatcatgttcagaaaaaaaaatcgggttcttactcgctattggtgctttcataatgactgtgnctgtaacaactacgagttattgttatctgactgtgacaatgcctcgagccttgtatgatagcggagcttagacaccagtctggcctctgacacacagaacccctcaaaagatatttagttcacaatacaaaat

SEQ ID NO: 459985 - DNA, 310 bp, Sorghum bicolor
  unsure (1)..(310): unsure at all n locations
cgtccggtagaagaaagtaaatacaagacgaaggaagccccaagaacaccatactgggagaaatacaaaagaaagaaaggataaatttgtagagcgcagcaccgtggggagcaaatcatcctcttcaaacaagcatgagagcctcttcatttgtgccgcataatgttcaaatatctggaggttggtaggtcacttgactactngagtatcggatctaaattgttgcttccatatatcttcttttgttcttggtatctgctggtaacttgctagtgcaattataaaatattatgatctggcatttgaaaat

SEQ ID NO: 459986 - DNA, 378 bp, Sorghum bicolor
  unsure (1)..(378): unsure at all n locations
cgtccgcgagatcatggggatcgactacctcacgcgccataacattgccagtcatttgcagaagtaccgttctcacacgaagcacatgctagcaggggaggtggacgcccgattccaacgcgtggaccgtgcccaccatcggattgcctgcggcgcagccagcggcgtctactnctgctccttctcctcatccgatgcagcacttcggaaggccgctgcatgtctggggccatccgacgccaacggaggagtcaccccgggtgccaatgtggcctcggcatcttgtcccccgcaccctcgctgcgtcgtgggctccttcggcgccatctgacccggcgttctggcaccatgcttacatgagggggcctgcacacatgc

SEQ ID NO: 459987 - DNA, 349 bp, Sorghum bicolor
  unsure (1)..(349): unsure at all n locations
cgtccgggcttggagccgtcgagtcgaaggttctgggccacgccgccacaaaaggggaaggaacaaggccttcttcgcccccgatgcctccgctgctcacctcacccgcctccgcctcctcccctctcctcctcgcctcccgcgtcggcgctctccaccaccgcgccgccgcctcggtccacttcctcgcgccgcgcaggaagacccgcccgagcccgaccccgggccccgcgatgagctggcttgggaagctgggcctgagcgggctgggcggcagcccgcgcgcgtcggaggcgtcngcggcgctggcgcaagggcccgacgaggaccagcccgcgcccgggaacga

SEQ ID NO: 459988 - DNA, 227 bp, Sorghum bicolor
  unsure (1)..(227): unsure at all n locations
tttttgatctatttcatatacatactatgctatatatggtattcagtactcagcgcacacatntaatctacatcctgaattacccgattccggtgaacgttcaacaattgcagacagagaaaacgatgggtttcgacttatgtttataattcatttgtccatcaggacattcagtgtatctgtagtgtgaatcaatgaaaaacattgaagttggggataaaggtagt

SEQ ID NO: 459989 - DNA, 344 bp, Sorghum bicolor
cgtccgatgatggctcacactgtttccagtttggaaatgctgctttcttctagtcattactcggtagcaacctttgctatcttccgctgctcctgttgttctgaatgtatattcaatcagctctaggaatttgtcattctaggtcaggtagtcagtctttattgagtactcgtgatagatgaatatgttgtatttaggctcatattgttttcgacgagcagtttagtgggtacaagtttagaggtagaacaagctgaaagttctattcctgtagaaaaggaaaagttcaccattctactttgtctaatatttcaaaatcaattttgttcaccattctggaagac

SEQ ID NO: 459990 - DNA, 296 bp, Sorghum bicolor
  unsure (1)..(296): unsure at all n locations
cgtccggacgagacgagatgtgtggctcgccttcatcagtgaaattatttcagtttatagattcattcgtgaatatggtccgggtggtgatgacccagcaattcacaatgtgtatggtgcctacaaagggaagaaaagagctgttagcagtgctgcaaacagtattgcaaggcttcagtccctgcagttcatacggagattatatgaagatccagcaaagctagtgcagttctcataccctgtccaatgcaccattggtgatgttgntcttcagaccctagcagtgaatttttggg

SEQ ID NO: 459991 - DNA, 157 bp, Sorghum bicolor
gcgtccccactgccttcagtaatcagttgcagtctgcaatcacatgcgccaacccggattcaactcaatcacgtactggccaacaactaacaggcgaccgcacacctcgatactactgtgtggacgagccaactcgttgtctcttactgaccacgtc

SEQ ID NO: 459992 - DNA, 101 bp, Sorghum bicolor
cgtccgcaccgaaatgttgtcatgctgattggtttttgtgttgaggacagaaagcgtttattggtttacgagtacattctgcatagatctctggattcaca

SEQ ID NO: 459993 - DNA, 220 bp, Sorghum bicolor
  unsure (1)..(220): unsure at all n locations
cgtnccgctgaaattgcttttcgaaagggccttcagattcgccattacttttaccttagacgtcagaaagcgagaagagttcgtctgctggttgcaaccgagcacgatgctgtcattgcccagaacggcggcggcggtgaccgtgtatgcgctgctcgctcttatcgccagcgccggcgccgccgctgcgggaggtggcgtgcagccgctgtcgaggatc

SEQ ID NO: 459994 - DNA, 129 bp, Sorghum bicolor
cgtccgcaacctaccagctcgaagttcctacgcgatacaccgcatgaaagtgctaaacaaacttcgccatctgatgtccatcaagaggactacgtctcaagatgaggggctagaacttctttttgcaag

SEQ ID NO: 459995 - DNA, 108 bp, Sorghum bicolor
cgtgactcgccctcgtcatgtactgcacctaacaatgaggagctgtactgtctggcggtatctaagcgtaagttaacttcagggggttccaacggtttatcgtataaa

SEQ ID NO: 459996 - DNA, 217 bp, Sorghum bicolor
cgtacggcgatcgtcaacgacgcgctcaagctcatgacctcctactccgactatgacagcggcaccggctgtgtctacatagagaacagcagtggtctgtacgacaaggagtacgcgcagcagacaatggaccgcacctacgaggtgcaagaactgcatggcaaccttaccaaagagatgcacgctaatggccaggacaacatctacatcttagcca

SEQ ID NO: 459997 - DNA, 184 bp, Sorghum bicolor
  unsure (1)..(184): unsure at all n locations
cgcacccacgcgagccgggcggcgatcgagcagaactcttttactttatatataaattcctgcaggggctcacgcccttccagttctgtcaaaaaggggggaggggaaaaaaagaaaaaaaaaaaaaaacncnaaagaactgaaaaacaaaaaaaagaaataaagaacaaaagtagtaaaaaga

SEQ ID NO: 459998 - DNA, 433 bp, Sorghum bicolor
cgtccgctgaaggtaacctttctctttgttgcaaaaaggaagagacaaactgataggttagcattactaagcagcttattacttactagtggaggtatccaggagaccaggacagaagcgtcttgttgtgtagcacagggaagggaaccttgaaagagtagtcaatcctgcattccgacaggattcgtcattaggccctctgttgtcaaaatagaatgaaaagtagataataaataggctacgaactcacgaaatgggactactttgcatatccatccatgtccaccataaatacaccagggttttccaatgggacaagcaaaaatcagtcatccacatgaccacatccatctatccacagctactcaaactcaacatgtctggattttgcatgatcctccttcttgcactggtgatatgattgatgcactat

SEQ ID NO: 459999 - DNA, 155 bp, Sorghum bicolor
cgtccggtgcccatgactgcacaggagaggtgactgaagggaacatgagtcctatgtatgggagagggaattcacggttagatactgggaagagggttgaagatgatggcaacgcattttgccccaagatttcagcaaaggcaatgggaatcggc

SEQ ID NO: 460000 - DNA, 393 bp, Sorghum bicolor
cgtccggaagcaatggccatgagggctcttccgctgaccccttccaagacctcctcgtttggagctcaccaaatcaggccgagcagtggcaacggcagatcagttagagcttatgcaaagggaaatgaggaggatggcaacaagcagtccctattcggaagcatcaccgaggcgctggacttctcgcaagtccggtcggagaaggatgccgagctgctgtatgaggccagggagtccaccaaaggtggagggaggatgacgagggaacaggtatggaactggaaccactgatgcaaagcaactggggattgataatgttaccatcagtaatctgaatgtcttttcacatgcttgtttgattggcgatgaagtacggagcactgaggcggaaga

SEQ ID NO: 460001 - DNA, 252 bp, Sorghum bicolor
  unsure (1)..(252): unsure at all n locations
cgtccgnaaaaaaaaaaaaaaaaaaaaaaaaaacccacgcagccagacaatgtaaaagcaaaccaaaactaagggggaagaaaaccgagggggggaaccaacacaagggacacgagcacccaacaaaccacaagccacggagaacaagaaacananaacacagacaacagaaagacancanagngcccaaaaanccacccggcagggggcgaacagccaggggaagggggccanacggaaagcaggaaccaa

SEQ ID NO: 460002 - DNA, 315 bp, Sorghum bicolor
cgtccgcgaaaggcggcgcagccgaggaactgaggaaggaagagaagcccgcaggctccgctagggcgagagaggtcggcgcgattcggggatgggcaagggcggcgaactctgggacgaatcggcgctggtcgacgccttcgaccgcgccatgtgcaccttcaaggtatgcttgcttgtctcctccggcttctatgacttccgggacagctgcccctcgcccgccgccgcagctgctagggtttagggtttttgggcgttgagaggtggctgtcggttgcgtcggtgggtaggcgcggtgggtgcctggggttc

SEQ ID NO: 460003 - DNA, 307 bp, Sorghum bicolor
  unsure (1)..(307): unsure at all n locations
gcgtccgctcccatccaaactgcggatacacagcagcgacacgancgcctgaacacgcacgcacacccacgttgtcagaagctgatcgatggcggctcangctctcctctccggccggcagctgctgggccgccccgccgtgcagtcgtgcggctccaggtcgncggcgaggaaggcgcccttcgtcgcagggccagctccagcctccaccaagcaagggccgacaggcagctgggtcgggtcaagcagcccttcctacccgaggccgctgcccgggactatgatcgaccggtgggctctgacccga

SEQ ID NO: 460004 - DNA, 387 bp, Sorghum bicolor
cgtccgagttagatgcttttatatggttgtatgtacctttttattatgccggcatagttagattagctgaaagactgtggtcactggatttactgctgggtacataataccaatgagcgtcgctttatttattttacttattatggtccttaaaaaaagttggcagcctcatattattttttccatggtattctttactattttgttcccttctagcttttattagtcattggccttttattgatattcttttgtttggtttcctgcaccggttctcaccacataaacatgaaattagcagctggcatgatcttagggctttcataaaaaacttagtagtcatcttaccgaaaatacttacatgctaataaattttgagtttaaaag

SEQ ID NO: 460005 - DNA, 269 bp, Sorghum bicolor
cgtccgcaaatgttcaatcgtcaaatgcccaagtttcatgtgtagttagtgcggagcgtgctatagatttgggggccgtttggttcttttgctgagggtgtgtagactcaaattctagaagacattatgtttcttttggtatctatatgcttcttttgttctgtcagcttttaaaggtagccgctgtataagctcagaccaagcaaattccgtgcagcaattgaggcagcttttctcactgaacgtgattttttatcaaaaaatggatg

SEQ ID NO: 460006 - DNA, 270 bp, Sorghum bicolor
  unsure (1)..(270): unsure at all n locations
cgtccgaacgagggaaaaaaaggggagaaaaaaaggagagggacagggagagagagggaggcggaggccatcatcccattcgccggctggtcctgaccgggtccgtgtctatttgggctgcgccttacgcancangaggtagagatcagcgcgttgttatatcttctatctttncatctgcgcgggaactactggcatttacgatggtggacaagaatgatgggtcagagggtcttaaattcaacacgttaaacctcattcaaacaacct

SEQ ID NO: 460007 - DNA, 389 bp, Sorghum bicolor
  unsure (1)..(389): unsure at all n locations
cgtccggcggcgtcggcgtgaacgtcaaccctggcaagcccggcggcactacggtcggcgtcggcaagggcggcgttggcgtcgacgggaatgggggctatggcaagcccggtggcaccacggtcggcgtcggcaagggcggagtgggcgtcaacgttaatcctgccaagccgggcggtaccggcacaaccgttggcgttggcaaaggcggcgtgggcgtcggcgtcaatcccgggtacggcaagcccggcggcaccacggtcggagttggcaagggcggngtgggcgttcacgtgaacaacccgcagcagaagcccgtaaacgtcaacgcctggcctttgctgtaaatgtacgccgcattagagacgcaagtgcacgaagaccccagc

SEQ ID NO: 460008 - DNA, 313 bp, Sorghum bicolor
cgtccgggattaataaggacgaatatatgaaccagtctggatagagcagattgaaggcagtcaggattaataagggctgatatatgaaccagtcgatctccaaacgacaccgtccagtggcaccggaggtcggtggtggcagcatgattccagatgaggtgctgctgttcgagatcctggtgcgccttcctgtgaagtcccttgtgcgcttcaaatctgtttgcaaggcgtggtgcgccaccatagccagcgctcatttcgtccgcctgcacttggaacttgcaagagctagaagctcatcatccatggtcat

SEQ ID NO: 460009 - DNA, 455 bp, Sorghum bicolor
cgtccgcaagaacctctcaatcaagaagaacatggcacagtcggcgaagctgctgcttctcctccctgccctccttctgctcctccttgtccaagcgcaaggtgcacggccggcggcggcggcggcgtcgaacgcgacgaagctcaggcccagcagcaagtgcttggcgtcgagcgtgacggtgtcgcagtccaacacgggcgacaaggccgggtacgacccggtgttcgaggtgacggtgcgcaacacctgccgctgcgccgtccgcggcgtctacctccgcttcgagggcttcgccagctccgtcgccgtcgacccgcgcctgttccgccgggacgggcgcgactaccttcgcggtgacgggcgccggatcgaggccgccggcgaggtgcgcttacgcttcgcctaggaccgcgccttccggatgaccaccgccaccgtgcacgacgactgct

SEQ ID NO: 460010 - DNA, 224 bp, Sorghum bicolor
  unsure (1)..(224): unsure at all n locations
gtccgcgatatatgtatatatatgtgcatagagtgtacaaagaaaagtctttagctatgttccattttgtatgaactatcttggcatatgtatagctgtctgaagaacttgacgttcaaaacaaaaaaaacttcatatacttaaaaaaactatgaantcagattcaaacggatcatggtattcgactctcggggaacccaaaaaacaatggtacttaatggagt

SEQ ID NO: 460011 - DNA, 382 bp, Sorghum bicolor
cgtccgtaatcaatgtctgtgatactgcactttgtcatccaaaagatatcttaagccgtttaacccttcctcatcgacaagatctggactctcttttagcacctggaagtgagagcacagctggagttaagccttatatgccttccatgacagttcatggagctagtttgccaccatttccttggtcacactcacaggctgggggctgtcggcaaagtgttgactgtggtaaacatgggtcaagtaggagtaactcccagtggcagtggggtacgggttggatccaacctcactctagattttgaagatacgtctgtccatagaattgatgatcctccttcaagagatggatgcagcgaaattatttataacaagatcatgt

SEQ ID NO: 460012 - DNA, 474 bp, Sorghum bicolor
  unsure (1)..(474): unsure at all n locations
ccggaatcgaccgcactcgatccacgcgtccggcactagtgcagctccagcagcctctgcaatgcccgcaacgcggctatgatgagctctagctagtccatgagcaaccccgcttctgcggcctcttcttccaggtccagcagcgccgccgcacaagagcaccgcctgccggaagaggaatcccaaactctgcaccaccacaacgaccaagaggtagcctccgccattgctgctccgtttcctcccagtagctgtgaagctgatcatcaagcccacgacgacaaggacgccgagctgtcgccgccgcgctgcgaatgggagttccggctggcggccaccgtgccgaccaccgcccttcccggtgcgtccgacgccatcggcagcgtcgacttcgaccccaccggcccgctncttgccatcggcggcatcgcccggagatccgatgtacgacgggcctcatgctgtgcgtgatga

SEQ ID NO: 460013 - DNA, 69 bp, Sorghum bicolor
cgtgcggtggactacatcttcaacctggttgatgaagtggataactatattccagtcccacagcggcag

SEQ ID NO: 460014 - DNA, 91 bp, Sorghum bicolor
cgtccgctttgtttctttctttggacagtgaccaaaaagttcacagccaagcagaagctgaggtgcaggatattatggtttttacgggctg

SEQ ID NO: 460015 - DNA, 528 bp, Sorghum bicolor
  unsure (1)..(528): unsure at all n locations
cgtccgaggttgggtagccctatggggtaccttggtcttaatgatgttccaggatcaatgttgagctccatgtctaggaatgtttggggtagtgggagtgtaaactacccgagcaatcctacaaacatgaatgcttttgcttcacctggaaatgggggtcaagtcggtattactggcgacagttggggaggtctcccttctgctcatgggatgggaagcatttcaagccttgggtcagggaatcttggtcgtggagctggagataatacctttggtttgccttctggcagctatgggagaagcaactcaactggtacaattggtgagcctttttctgcatcagtcaatacgtatgaagtgaacaacccagatacatatgggagcagctctatttatggtggcacagcctggaggttcgcatcatctgaggttgacatgccttcttttggtcatgatattggaaatgtngatccaactatcaaatgagacatgtcagcaagtcacatgggcaactatnctgttaacaac

SEQ ID NO: 460016 - DNA, 263 bp, Sorghum bicolor
  unsure (1)..(263): unsure at all n locations
tcccggtcgaccacgcgtccgacaactagagcctactatctcccgcgcgcgggcgccaccgccaccgccaccctcctcctcctcctcctcccggctctcgccctccggctcgcggggcggaccccgccgagcgcatccgccgccatggcctccgacgcgaggctctccttaccgtgccgcctgccctcgctcctccctccgccggtgctgctgcgccggttgccccgcgccgccgacggcgnggaggcgtcaacctccccgcg

SEQ ID NO: 460017 - DNA, 357 bp, Sorghum bicolor
cgtccgcggacgcgtgggtctgaaaataatgtagtaaaatgagtatttactgttcctcttcttttgtttttctctctgttccatgattttacaggcacaaggactgtgcacacagctggttcctactttggctctttgtggcatactggtacagaaattgcaataattgaaattcctatgatcttgtaattttaaatgtaaattcgtttggatatgccatgactataagctaaatttgttattagtctcttgaaggctgattgagatcaacatgatacattgtgaaatgcacgcttaccgacaatgacaccactgaacttttggagaatttattacattgtgatcctacttactaaa

SEQ ID NO: 460018 - DNA, 355 bp, Sorghum bicolor
cgtccgcgcgcgcctgtctgcactggtgttcttcctagcacagaaaaagcataagacatacaaagatgcacaagatggcgcaacagagggcgggggccgtatacggactcggaggacccggagcgagagacgctgcgccggcaggggaggctcaacgcgcacgtgtgctgcccattgagacgctactgctcgcggctcacgtgatgctgcgcgtggacaccatgaccgctatgctgcgtgaccagcagagcaacgatgtcggcaccgtcatctacttctaccttgagggctgtaaacacctatggtacctcaacggtctctgcagatgctacttgctggagtgcgcgttgtacac

SEQ ID NO: 460019 - DNA, 343 bp, Sorghum bicolor
cgtccggcgacttctaccgcctcaaggcctacttcagacgccctacgcgcggaccacgacgtcatcctccatgacaaccaccgctctggtgtgcagaggtggtgtacgtgaccgagaatctccaagataaggaggcgaccgaggtcggtgccagcgctgtcaccgacgccgaggaagatttgacggcagtggacgacgtcaatgcttccttggccgatgacgtctaagagccaacacagccggcagctgaagaggaagaggctgctctcgatgtgcaacaagtgaagtcctaagacaggctgatcccgggcaatgtacgaagcgcaggagtggacaccgaccc

SEQ ID NO: 460020 - DNA, 54 bp, Sorghum bicolor
cgtccgctcgatctagataaggagggggtgatcactttctgatgataagaaaat

SEQ ID NO: 460021 - DNA, 499 bp, Sorghum bicolor
cgtgcgatatactctgatagtgacctttccttgcatatgtattccataaatggaaagcatattgcttcttcggaatccaatagccggctcaggtgcatggagctaagttgctgtggacagtttatggtatgtgctggtgatcatggacaaattgttctgcgctctatgcattctcttgatgttgtttggaggtatgagggagctgggaaaacaataacttccttagttgtaactcctgaggagtgcttcttggcgggaacaaaggatggtagcttgattgttttttcaatagaaaaccctttgcttcgtaaaaacgccatgcaacggcacaaggcaaaaccttccattggtggttagtggtatatagatgaaaacagtaccagaactgcttgctgcatgtttcaaatagaggttatctatcggcaataattgtaaaagagaagattctattactcatgtataaatgtacatatggcatcagaatgagtttagcattctg

SEQ ID NO: 460022 - DNA, 304 bp, Sorghum bicolor
cgtccgcgagctaggagcatagcacccacaccaacgaataagcatagcgccgatggctgcctatatgatctcgacgctatatatactaacgccgtgcggcagggcacaaggactgacagccgtcggtcgctgcacctactgcttgcgcatactctgcatcaccggcaagtagaacaagaccgacaagcactgcgggattggaggcggcctgaccgacgacaacgatgcctgaccgaggaatgtaaagggcaagggcgcacaccacatagtcaacaagcaccgaactgacgtcgaccgatacagc

SEQ ID NO: 460023 - DNA, 266 bp, Sorghum bicolor
cgtccgaacgacggtgcgatgatccatccctgtgctcacatgaccacaggtccatacttagcgccgcagcactgaccttataccaacgacggcatacgcggccagccggccacctatactagttcacccaccctacgtacgtgcacctacgatggcgaccacggagatggcgaccacgaccgcgagcttgctggtgttgttggggcacagcacgcgcgccagcgacggcaggttccgcagtaccactaccacccatattgccgcgg

SEQ ID NO: 460024 - DNA, 308 bp, Sorghum bicolor
cgtgcgggaggcgtatgaacaatcaacgatgggtacctattgacctaatcttggcggtcaaccggatgagggcatttactgtcttggtggagcggcgactacatattatatgctgtccagggatctacatgtattggaaaggcagggagataatgtgaccaccgcgcaatgatacgacagaatggcatactcaattaatgctgtgcactagcaaatcatgatcgtattatgctcagactggtacttaagatgcacatggacagcgtcaactattctatattacattatgaaactgtgatttaacctgc

SEQ ID NO: 460025 - DNA, 356 bp, Sorghum bicolor
cgtccgaaataactgatattctcatagagtgggggatgcctgcaacaatgcgtgcaatacatccgatttactttgccaaatgtttgaaaaaggccattcataataataatgggaaagaagatggatagtccatcaaatggtctctctattgtaggatatctaagacctgctttcatagaggaagaatcttacttgaggagcttgtttcatggtgaatgcagcagtgatcgttattcatctgactggaaaggtactcctgtagaaaaattggataagaataagcttctttccttctctcaaatcttatttgacaatccagtgccattttggatgtagtaaatgaaacagatgaatac

SEQ ID NO: 460026 - DNA, 103 bp, Sorghum bicolor
cgtgccgaataactgatattaatcatagagtgggggatgcctgaacaatgcgtgcaatacatccgttctacttaagacaaatcttgggggcggcgcgtctata

SEQ ID NO: 460027 - DNA, 292 bp, Sorghum bicolor
cgtccgcttctattctaccttccatgtctcgagcaagccttaactgcatctatgatagcattggtgttcaaagaatatccaaagcagtcaccgagaatgatgccttcaccttagacaattaccatttcagaacagttgatccaagtaaggtgatcaaggttggtctactcaaaataattctctcattccttgctgatcctgctctggacattcctgctgaaaagaggcacaggatggtttcttgccttctgaatgtgactgtccaagagagtgatgaaccaatcacagtggg

SEQ ID NO: 460028 - DNA, 227 bp, Sorghum bicolor
  unsure (1)..(227): unsure at all n locations
cgcgtccgaaagaaagaaaactgnaaaccaacacnacactctcaaaagaactgaaaacacactcacacatggccggccgctctatatttcccgggggcttgaggcgccctaccttgcgaacgctttcatacaacctcaccgacattcaatcgagtgcccgaactttaataacctgcgccactgttaaacaacatggcgaaccggaaaaacattggccttgcccaaaa

SEQ ID NO: 460029 - DNA, 202 bp, Sorghum bicolor
acgcgtccgggaggggaggggaggggaggggagtgcaccttcttccaacatcacctactccttctgccccaactgcttgaatctaacggaggtgggggtacactactctatgttggacactgtcttcaccaagtccatccttatcctcaaggcgcactaatttttctacacctcctagtacatcattttcggcaacattcca

SEQ ID NO: 460030 - DNA, 431 bp, Sorghum bicolor
cgtccggaaattcctcgccgatggaaggggccatcgcccgcggggcgcggtgcccaaagatcagccgcgccacgttcggctgcccggcagtacgcgtccgtgtgccgagaagcctctgcggcggccacctgggtgcacggtgcagcagcgcccgtgccatgggcgagagcgcgcgtgacgaccccaggccaagagtggcgcgcgcgaatggccaaggccatggggaggtccgcgctgcggccgggtccgggtgctcccgctcccgcgtcgccgtcccgtggcgagaagagggggagcgtggccggcgccgtggcgctgatcgttgggaccagcatcgggtccggcatcctcgccgtgccgcagcgcactgcgcccgcgggcttcgtcccgagcgcggcgtgcatggtcacctgcttggcgttcctggtcgc

SEQ ID NO: 460031 - DNA, 316 bp, Sorghum bicolor
ccgggcggtgggcaacataattccccatctatgccatagcagacaataatgagtggtatgaactatccaaatggaaggcatcacatgggtaaccatggagtgcctccgagaatggaacagcctgctggtcggttctggctggcatgttcctggtgataacatggccaatggtcaagcagcatatgatcagtatcagcctgaaaggtcagggccttcttggcattgacgagataacccgggagggcaacggtataacccatatgcaagggagaaccgtcagggattctaagtggaagaattcaacccacatgggata

SEQ ID NO: 460032 - DNA, 406 bp, Sorghum bicolor
cgtccgccgggacccaccgcggccgtgtgccgctgggggccgccgccgccgccgcctgcggtggagccgcgctcttctacgcctcgtcttcccccaccgttgcgtacctggaggagaagggcgaagccgctgagaaagttgcacttaaccctgataagtggttagagttcaagctacaagacaaggcaacggttagccacaactcgcagttattcaggttttcatttggatccatcaactaagctgggactttgatgttgcctcgtgcctcatcacaagggcacctatcggtgaggaagttgagggaagaagaaaatttgtgattcgaccgtacacaccctatctctgatccagattctaaaggatattttgacctattgatcaaagttatcctgatgggaaaatg

SEQ ID NO: 460033 - DNA, 217 bp, Sorghum bicolor
  unsure (1)..(217): unsure at all n locations
gcgtgcgtacattgaatgtccgcgatctcgactactcgacaactagctctgtgtgtcatcctcgcggtttcctgcttgtgcatgagaagaagcttcacgtcatgcctgacagatggcagccgagtactgccgccttcccctccggcgctgcccaacatcggcaaccttcaccagctcggccggagccaccaccaccggacactgntggagctagcgc

SEQ ID NO: 460034 - DNA, 354 bp, Sorghum bicolor
cgtccgctcactcgtacggtccctaccagcgaagtcatccaaaaagctgaacaaagagctatttgacaaaccatgtgatggaccgcgtgctgagatcgttatgcacagtgctgggaccgatgcctcagcctctaactgcatatacgaaggcaagaccattatcgagagcacgaacggaggtgcaaccagggctgatgcagcgcttgaagatacagatgatcaaatagacgaacattcagatgaatctctagatcattatcgagcagatgatcttgacaacgaactatacagcttggaggactggtatgagggatcttatcagaagcctagcattacactggagagtggcatcgg

SEQ ID NO: 460035 - DNA, 391 bp, Sorghum bicolor
  unsure (1)..(391): unsure at all n locations
cgtccgtctcgatttgacttccaaaatgcaattgagaaacttccaaataacatatttgagaagagctatcctttgagagagtttgatctaccagagcgaatcagtgcattcttttataaagctgctgagcttagtctggttgggtttgtggctggctctgttcaaggtggtatgtcaaaagtcttgtctgcaagaaaagaaaggaggttatcggtgactattccctctatcagcaccaatgctcttggttatggagctttcctaggactctatgcgaacttgcgttatcaattgctctgtggactagaccaatatatggtcaagcgctntgatgttttgggtgtggcaatcttctttagcacagcagcaagactgatgaatattcagattg

SEQ ID NO: 460036 - DNA, 251 bp, Sorghum bicolor
  unsure (1)..(251): unsure at all n locations
ccggatacccggtcgacccacgcgtccgcggggagccactctcggcgcaatcctcttcgcacgacagggttataatcaagctcaatcgaccgatatggctgaaactacaagcacggtggcgcttgatgtggttgtgacttangactattatctttactctcttttgttttgccgagaacctcctgccatcctctgttgccgctactgacgtttctgagaatagaacagagcgtttcatgttctttctgatg

SEQ ID NO: 460037 - DNA, 457 bp, Sorghum bicolor
cgaattccgggtcgaccacgcgtccgaaagggctctggtagatccaaatggacttgacaatgaaggggagaaactcaccatataggcactcgatggcttacacaccagtgctgctgccaaggctactgaagaggaaatcagagaagacgctaatggaacatatgcagggctacggtatacgcaaggactgtcagctgacatgttgacatccgcaatgtcaactactctggagagaacttcatgctcttgcgctttgatcatctggcggcacatctgttctatcaagttgccctggtctacacgagcctgcaattcaggaagttgacaaagctgaccatgaactctcgagaaaagtagatgaatctatgcaaaaagatattttacacagtgctcatgacacaatgcggtatgctgaggtcatcagcccaccttaccaggaagcatgccagcttaaaat

SEQ ID NO: 460038 - DNA, 62 bp, Sorghum bicolor
gctgacctgcctttcttggcggcgcgacaggcacctaagaagggctcggaagaaggagaacg

SEQ ID NO: 460039 - DNA, 81 bp, Sorghum bicolor
gacagcaggctcctcgtcgtcggcagcagcagcggcagcggcagtaacctggttctgccgtcgaagcgggccgccgccgcc

SEQ ID NO: 460040 - DNA, 390 bp, Sorghum bicolor
  unsure (1)..(390): unsure at all n locations
cgtccgcaagagtaaagatggctagcatcaatggtaatacacagcttcaaattntgtgtcactcaaacatgtctgtaatgattacttttgtagggtagccagatgtcggcatcaattntgccaatacctgtgttggttattgcaaaatgattcctgtgggtctgttgctatttagaggaaaccccaattggtctgtagctgttacttgaagacactgtttaattgctcttcaaggtggttcttttcaaggagtagttgccttggcctcaagatgtgaagttggcatagccacaacacgtccgtgagtcatttagttcttcaggaaccaatgcggtgctatgaaagtgaaaatggtagtattgttgtggtcggccttttgctttgagacct

SEQ ID NO: 460041 - DNA, 444 bp, Sorghum bicolor
cgtgcgaccttcctcccctccgtccccttcccaccaccaccaccctgtcaagctggcccgctgctccccgtcccaccttagggaggtggtgctggaccatcacctacttcccctcattcccgacatggatccccagttgcttgaaaaagctcttgaggcctcttgagatgacttggactctgcaataaagagattaaacgagctgcgcctggagtcagctggggctatgctttctggcactttgtgcgaatctgagaacggcatgtcatcagctcttaagttatcggctgaaggtaccgccagtaatggtcatttggacgtagctactgaaaacccacctgcaactgataactctcaggcaagtcatcatagctctgaatgggttgagctatttgtcaaagagatgatgagctcctcagacatagatgatgcacgagctcgtgc

SEQ ID NO: 460042 - DNA, 455 bp, Sorghum bicolor
cgtgcgagaatacgtaagcacccacttacttaatgaccaccataactcgcttgttcctgctaggcatcacacgtcacctagacaagcgttacgtggaggctggatgtgatgcatgtgatatgtgacagtgacctctgagtccttggctagctatgctcaacagacgcattgtgtcacacacaccagaatgctggacacctatcaaacatataaagggtagggagacctttaccatagcatatgacacattacgcacactattctgctcacatatacattaactgagcaacacgcttaaatcgctctgatcgtgctgcatgaagacaacgcctcagagcagatctgaaactaggtcgactcaaggacttggtatccaggtacgctgaccatacataggcagcgctagacgacttgctatataagctcctacgcattgagccatccatacgtgttac

SEQ ID NO: 460043 - DNA, 198 bp, Sorghum bicolor
  unsure (1)..(198): unsure at all n locations
cccacgcgtggcggaaactaaaagatcactcttccatgacctcgtcaaataatactgntcatacacatctatattaaatattataactcgcgcgtcggtattactattcatactcatcaattacaaatacatattcaatctcttaaaaatatatacaataatactttctctctcacaacattaataagtctctctatc

SEQ ID NO: 460044 - DNA, 558 bp, Sorghum bicolor
cgtccgcccacgcgtccgcttgggttcttattgttgccttgattggcatctttccattggcaccacatgccctccagtacaagggatatagggtgtcacttggtggcacaacatgtactacaggctatgctttgtttgctttgtacaggctaccccgagcagggaacctgcaggctgttcaggcgtggtgtcaccatgtaacttcatcaaaggattttataccattcatgtactgccttatgtttgctacatctaaactgcacttgaagcttgttttggtacctgtaattagttgggcacttgaacatgtcgctcgatttctacggcgacattttactagctcatctttgtacaggacatacttggagcaaccttgtacatgggttgagacaaacacaactgcagtccactttctacgttcaaattcagagattgtgttgggctttctattgatcctatccctgttctcgcgacagcgaaatgtatgcaaacacttatgtatttgcagttgctgaagcctatgtaccattcttccttacttgcgctatcatagagcta

SEQ ID NO: 460045 - DNA, 139 bp, Sorghum bicolor
cgtccgaagaacaaaaaaatatattaaccttaccaacactctcaaactcacaaaattagctcaccaatacccatcaacaccatatcaattctgggggcggggtatggacaacactcaacatgggggcggcccttttaaa

SEQ ID NO: 460046 - DNA, 301 bp, Sorghum bicolor
  unsure (1)..(301): unsure at all n locations
cgtccgcgggcagcatgggatcctgacaccgngaggtagtgacattcaataacactaccgagcgcgagagcagcatgggatgaagatgcagtcacagctcatggccttaacgaggatacattgagaggaactgtctggcgccagcctcctgggcaatatcaactccaatagcgggtctctaaaacgaggcagttgaagagctatcatctggaccatgggacgcctgatgaccttcgtataacatttagaaaatacctactcgacaattacatctatgttgcaatggattactacactggac

SEQ ID NO: 460047 - DNA, 453 bp, Sorghum bicolor
cgtccgagaagaagctctcgcaaacagtggcttatatctcgtccccgcgcaaggctagtcaccatctcccccgttacttacttaccgaggacgcagaggaataagctccccgatgcctctcgaaccacctccttccgccgggaaaagtatctgccggggaccacctgagtcctaatccccttccggcacgcagcaaaacgaccgagcgcccttctccattcccgccggcacggctcttgcggccagattcgatcacatgaagcgaagcgaaagtactcgatcgtatgcttcgaggctctaaccaactgctattggggggctcaagcgcgcgcgctcgtctctcggcgctggcctctccagctataataaaagtggcagcagcagcagcacctgcacaagggactgggcgaaccttgtggacaggccagctggactgatcgccgagattgccct

SEQ ID NO: 460048 - DNA, 352 bp, Sorghum bicolor
cgtgcggctattgatgcaaatgtatcatccccacctctcttatcaaagaaggatagctgtgattatgatagggtttacagtaatcttgctactggaacccctccaaggactccgttgcatccattagctgagagttactgggaaaagcagtggagaaacctacacaatggtggaactgtttctaatgacggaactactcctaaggagagtgataagggtctttcttataaaagatcactaaagcaatctttgagccagaagcttggtttatctaggacagagtcagatccttctccagttaagatagtcagcgtgaagagtgacaccaaagaattcagtgagacggtgtctt

SEQ ID NO: 460049 - DNA, 284 bp, Sorghum bicolor
acgtcattctttcctactcttaattttggtttatactactaattttatttctatgggtagggtgtattcctgtctatatatctactaaaaatatcaattccatcttacttctctttacaaatcattatctttccattttcaacattcaacagaacttttccttctctaaagaacttaatgctctgtatattcatcatcacttatcatcttaactctgcatgatgctatatcttccctttaatatttatactatattatacattatactaacataataatactac

SEQ ID NO: 460050 - DNA, 334 bp, Sorghum bicolor
cgtgcggaggatgcacatagtgacagtacacacgtgcttagcactgctagcggtacgcacataacctgtgggctatttctttcaaggagtgcctggcacacatgcccgcgtgccgtaaccttacgtacagattgtgtcatatatctcaaggtgtcttagaatcgaacatcgtgctattctaactgctataatcatctgtcgtgagtataggtcatgggttcgacgccaatgacgattcttatctgtgcatcacatactactactcttaagagaactggctaagatgtctcttatgctagagggacgtagtgcaggaacagacacacttcaccga

SEQ ID NO: 460051 - DNA, 53 bp, Sorghum bicolor
cgtccgcttatttgcatgtatatgttaccaaatcttgctgggttcatgccatc

SEQ ID NO: 460052 - DNA, 334 bp, Sorghum bicolor
cgtgcggctcggctaggtcgctctacctcatctctcagctctctgggccactcattgccggttggcattcaatcgttcctgctgccggggagtgggcgcctacgaggtctcgccgtctccagagtgctctatctctatctcaagataaaaaactggccaagaacgagagatacacgatacgaaagagaggcaagagagagaggcgatcggaggcgcctccggccagggggaacataaacggaagcgtgcacaggaagctgataaggctactgtcgatcgtgccctttagctgccgtactggacccgtctactactcgccgaccgcgaaccacgc

SEQ ID NO: 460053 - DNA, 456 bp, Sorghum bicolor
cgtgcgagttgatgctgcagaccagcggcttcagggccgattttttgcagaggagatgcgacggattctgcttgtgggtctctcttgtgtgcagtggagactgtaagaagcgacctggtatgctaagggtattcaagatgcttgatggaactgcacccttgacaatggtgccagataagaagcccccctgttatactccagacacaagtaaatcaaggttcatcaatgaactcagtggatactgtcaatacagcgttctacagttgtcgctgaacttatatgttaataggttggctaataaccacatcctgattcatacgtgggggtgttgatgctccaaatttcatttctgaaacatgagttgaagctaatgttggggttgttccacattgttggaagatatcctacttgggcacagaacgctgcataatgtattggtttctggtacaaaatgcc

SEQ ID NO: 460054 - DNA, 236 bp, Sorghum bicolor
cacgcgtccggctggatcgactatctccccctccgccaccactccccccatcgatctctcctcagtcccccgccgggaagctacgctacgaagcatggcgtgcgtgaccgcccgcgccccggtcgcggccctgcgcccgtcggcggcgtcgtcgctcaacagtcggcggcgcctcggcttctggcacttgcgctcgcgacggtgcacccgccactagcggcagcgggcgctctccg

SEQ ID NO: 460055 - DNA, 126 bp, Sorghum bicolor
cgtccgaaccatggctacagcttacgctcccatggcgagccagtgatgaagagcagcctgcactgcactccaagccagggcttgccgggctgcgctacacacaggcgtccgtcacgcaggcatcac

SEQ ID NO: 460056 - DNA, 275 bp, Sorghum bicolor
cggtcgaccacgcggcgatcaagcaaacccttgaatgctagggggttaacttgacattcaaataagctgggtaaactgccattccccttgttcatgaggcagcgggaggcgacggtcttggttgtatactacttacagatagatttgtcatcagattatatagtatatcatatattcagcatattgtgtcctccttgtgcatggctgtgatcagaatcatgtcagccgctactcagtttaaatgacaggtgcatgaaaaaaaaaaaaaaaaacag

SEQ ID NO: 460057 - DNA, 95 bp, Sorghum bicolor
gtcttattcttggtctgcttatctcatgcgtgcccgggagtagcttagctgatcatatacggacttaggcctcgcttcaacatagattcctcggt

SEQ ID NO: 460058 - DNA, 284 bp, Sorghum bicolor
  unsure (1)..(284): unsure at all n locations
cgtcccggggtgaagttataagggaaaccctaatgggcctgacccaattaaatatatcccaggccaaaagcagcccatctgccagtcaactctgatcggggaggaggcctgatcggacgattaatcgtgattaatcgacgattaatcggacgatcaggtntctggtcgctctaatcgaatcggaggccctaatcgagtgctacagaccgataaggacgattaatcgcgattaatcggacgatcagaaaacactgcgattcatacanaagactccaagatgtggc

SEQ ID NO: 460059 - DNA, 157 bp, Sorghum bicolor
acgcgttgcgtgtccggcgcaacaagatccaatccttgtagccttcaacaggttaggaaggacgagtaggaccacgtacgtcgtgcccccgtggcacttgcttcacattttatttcagattttctgaaccagagcaaaacacaaatgttgttgtact

SEQ ID NO: 460060 - DNA, 161 bp, Sorghum bicolor
gacggcgaaccgtcgacacgcgtcgacaccgccgaccacaccaccatggcagctgtcagccgggcccttgagcaccgcaagcgggtcgcgcactcgctgtgcgtccgcgctccacctgcgggcgtgggcacccgccctcggacatgctctcattgacatag

SEQ ID NO: 460061 - DNA, 164 bp, Sorghum bicolor
cgtccggatgattcgtcagacagtgtggttgatgatgatgatcatatttctaagtttgagaaagaggtggaagagacatttcagcgagccctgggtggcggcgttaatcgagataatttgatactagagattaatggcctaaggttagcctacagcctttaaca

SEQ ID NO: 460062 - DNA, 74 bp, Sorghum bicolor
cgtccgctgcgcccaagccgaccaagaaggacgccgccaagcccaataagactgccgcagcaaccatgcccaag

SEQ ID NO: 460063 - DNA, 202 bp, Sorghum bicolor
  unsure (1)..(202): unsure at all n locations
cgtccggtcaagatcatgaagaaagcttttattcgatatggtcaacacaatactatcacaaatccttgctgcatgctngaacatgcaactcttgggtcaataccactaggaacttggctccactgtgggaatcatagggtttatggagagactgtgaaggagctaaattagatacgggaacaacttgcacccagtgacacta

SEQ ID NO: 460064 - DNA, 201 bp, Sorghum bicolor
  unsure (1)..(201): unsure at all n locations
cgtccgcccacgcgttcggctttatattgcttctattggcattnatcttcagatttgaattgcagtaccttgaagtcagggagaatgaatatgatgagaaggtttacctggacttgtatactgtaagatgatacagagggctggatctatattcctttgataatgtataggatgtgactataggagtattaagttgtaata

SEQ ID NO: 460065 - DNA, 444 bp, Sorghum bicolor
cgtccggttttaggttgtacataactagacaagttccagattgaactcaggttccttttattgctttacctgcaatggtgcatcttcttctaagggtacatatgctgcgaagttgcaacctctatcttcatctgtatcgcttatgaaatgtgcagtaaactgcgagagtgtctgtgcatcagttctattcacaagctgggcatttccacttgtatatgattggagcacacactgagaagcaacttggtttgatgttattcctttcaagctttctatcactccaagcagctgcatatatgtcaaatgttcttatgaggtcaataataatttataaagcttaagcattcacgtgtgctagtttcttttggcttttctggttcttctgctgctattggttcatttggtatgcatgctactatactatttaatagtgacagctaacta

SEQ ID NO: 460066 - DNA, 90 bp, Sorghum bicolor
  unsure (1)..(90): unsure at all n locations
cgtncggttngcgtgcactgtgggacaaaaacagagcaatgccaaattctacctggacgattcattctaagtggtcactatgctgagcgc

SEQ ID NO: 460067 - DNA, 203 bp, Sorghum bicolor
  unsure (1)..(203): unsure at all n locations
cgtccgccctcgccctcgtcctccgtcgcctcccgccggctgaacatattcgcccacctgtctcctcgccagtcgcgcctcctccgtctcgcgccgntgcacgttagtgatgactccagcaccgatctcccggaggagaggtctcggacgagtaaancgncgactgcatggacttcngggagctctgcaacgacttcgaatgc

SEQ ID NO: 460068 - DNA, 204 bp, Sorghum bicolor
cgtccggattgcgtgcactgtgggacataaaccaagcaaagccaaattctacctggacgatacattctaagtggtcactatgctgagcgcacttgcagatgcagcaggacctgaattggagactgattcgtgtgatgaattggccaaatctttctcttcagttgatattgaggacgaacaatcagaatccagtgatagaccaat

SEQ ID NO: 460069 - DNA, 197 bp, Sorghum bicolor
  unsure (1)..(197): unsure at all n locations
cgtccgaagtactccaaactttcatttggcagtggtcgttcngggttcatgatatattgtaccaaataccanntttgaattgntaatctcatatatgcttgtatttgcttaatgcttaccttcttatccattttctatcgagcggatggtccctgttttcttgttaggggtctccgtaatcagctaatggagtaatc

SEQ ID NO: 460070 - DNA, 198 bp, Sorghum bicolor
  unsure (1)..(198): unsure at all n locations
cgtccggctgctntctgtgttggcgagatatgcaagaatgggggtgcttcagcactgaaatactatggggatatancttcgtctctgcataatttgtttggtaacttagaatcagatgatgcagtaagagaatatgctgctggtgttattgtaggatgataatggtgcatctaagtcaattcctctcaaccaggttct

SEQ ID NO: 460071 - DNA, 443 bp, Sorghum bicolor
cgtccgaccagcccaaaccacccccgccgccggccgtttccccccccgcactccaccacctgacctgcgccggcccatcctcccggcctggcccaagccaacgcgccccgcgctgcccctgccgtgccgagtcccagccggatccccctcaaagcacgacaaccccacgccgccggcaccgccgcaccaccgaaaccaaccctacccaaaccaaatcggatcctatccccttcccctcccctcgcccaattcgctccgatccgccgcgaccgcgcgatggacgacgacgacgacgtgtcgcactccctctccccgtcgccgccctcctcctccgcgctccccgtggacgggcccgtcaccgtcgccgctgcgccgccaggctccgccatggcggtcgcgctcccgaaccataagaccgcggcgttcctgtacgcccgcgccac

SEQ ID NO: 460072 - DNA, 242 bp, Sorghum bicolor
  unsure (1)..(242): unsure at all n locations
cgtccggccggcctccctcgtcccctgttgaagacaacgtccatcgtggagatcccacactgtggcgcggccgtgcaacagcccctttgagtgccaccaacgtgaagcagatctggcaagtacaggacaacctgaggtagcggaggactagccaaatcttccatgagcagactccgttgcggatggtttgggtgggtggtggtgtgcggttccancggataacccaggatcatagggtgatc

SEQ ID NO: 460073 - DNA, 422 bp, Sorghum bicolor
cgtccggccgcggctagtgagcacttggaaggaatttgagcgcccggaggactggcaggaatcgcaggagccacagtttgtcagcctgggttcgggcaagttctgcattgcaaggttcttccatactacggtaactgttagcaatggctactacactgatgatgaagttactaaccggtcatttggtgtcttaactggtgtggaggtgttgccacgcgtctatgtgcgcaatggggatggcagtgccaatgacagcaaaggggatggcagtgccaatggcagcaatgggaatgggaatggcaatggcaatgcaagcagcaatggcaattcaaccagcatttgcaacggtggcagtggccgtggcaatggcaacggtggcaaaaggaaactccggatggtcaagcataagttgagatgtcacg

SEQ ID NO: 460074 - DNA, 293 bp, Sorghum bicolor
cgtccgtacactccacgctcttcttgcttgcctgtacgctatggctatttccatggtaggagagatgctgactgcggaggcgatgccgcacgatggactgcaagtgccaaagctggctgctgtttggtgtccatagatcgccgaacgacctgatatgaggctgcaccaggactgtatgttgcgctgtggaggatgaaggatcatggctgcggaatgccttgaacccttacatggtctatctcacatctttactgagagcgacgcacaacgcgtctctgcactgatgttccaac

SEQ ID NO: 460075 - DNA, 430 bp, Sorghum bicolor
  unsure (1)..(430): unsure at all n locations
tttttatttttccttttccgccttttnttttacttttttcaaaaaaaaaaaacatgtttttggaggatcatgaacaagttgcgtttgtttttttaatatatataagggaacagtttacagaacggggctaaattgatccatactccattcggttgctagaaagggtgaaaaaaatggccaggattttgtttggactttggagtatgaaaaggcttcataaatctgcaccagcttttttactgatcaactgctttttatttttccccacttccattgcatgtaatctataatatggccacgacagtactctttaaaatcagaagtagctcctacttgtcccactcatgtttcttccactctggcaattgttgaatgatcatttgcgcaaaaaacaagtcttaaaggaatgctatcaatgtcatgccttgtg

SEQ ID NO: 460076 - DNA, 471 bp, Sorghum bicolor
cgtccggtttttatgtagagccaaaaaaagagagttgctgaagagaagaagtccgcgagaaagatgggcctcggagtgcggctcttgcctccctctgcagctgatgccgccgccgcggcttcagtgaagtttgcatcaagatttgagaagaacagaaaggacaagagagcagctatcaaagctgcttccatcttccctgagtcatcgagctcagcatcaaatggtaaactcgacctcgtgctgaagaggcggaacataaaagctggcgcggccaccacactgatggcaggcagggtgaagccatcctcctggcagagcgccagttccgcgagctcaaggacccggatgccggttctggcagcgcgcaagtaggcagtccaggctttcaagcttgtgaaatacttgcactgtgcgggaagtagctgcctggttctatatgaattatgaaggaatgtacgtgttatagctttt

SEQ ID NO: 460077 - DNA, 91 bp, Sorghum bicolor
accgtccggattcccggcggacccacgcgtgcgtctcgtataatctcctgctatgagagacaagacagccagagccaggccaggctcgctg

SEQ ID NO: 460078 - DNA, 338 bp, Sorghum bicolor
ccgcatcccggtcgaccacgcgtccggaacgacctcttgctcatagttgactgctagattagggttcaacaataaaagacctagtactgatacacaggaacaccgaactgcagagagtgcgccggttcgtttctctcacgtcgaatacaccgtctcaatggcaccaaacaaacccctccttgctgctggataatgatgatatcttcagacaccatgcagatctagaacaaggagttggcttctgagcagatgactcaaaaccgagcgataatgtgggagaacacaacctgaaagtccttcaatggcgtggccacaccttcaggcttgaaggtcaaatg

SEQ ID NO: 460079 - DNA, 274 bp, Sorghum bicolor
ccgatcccggtcgaccacgcgtccgcacagagggagttctccgtgtatgtcaacggcgtgaagacggccaactcgatcggcggcgcgttagggtaccagaggaacggagcattgggcgcagctcaagtggaggggctgtcgctggccgtcggcaaggagttcgagctcaaggtcgtcatgttgtagaaacatgcatggcactcgagcttgttctgaataaaaactgatcaaaagtttgaatttaaattggaaataaaagaatggtatcataaaa

SEQ ID NO: 460080 - DNA, 519 bp, Sorghum bicolor
cgtccgcccacgcgtccgcaaggtgattgcgctccccttcttccctagctagatccacgccatggggacctcaggaagctcccccagccagatccatgacagaagcaccgacgacgcacatgtcgacctcgacgagtgccctatctgcttcctggtaaccatccttttccccatcttccccatctacagttctacctaaccactcctcgccgcgctgctacgtgccggcgctggggcgtccgtgccctcctccaggttttgtctccggcgatgtaggtacccaactccgccagatcagtcgcctccgcctttcctcccgccggcagcaacagccctgaggaggaggcaccggtcctaccgctcctccaggagttcatgattgaggcattgagaacgagctcaaagcatattcaaagttaaatcatattagccattgcatgagtggttaacttgaattcatattaactcaatgcctcaataaaggtacgtttaattcatatagctcaaagcattctcgag

SEQ ID NO: 460081 - DNA, 257 bp, Sorghum bicolor
cgtccgccacgcgtccggaaagcagcctgcagctgcactccagccgagggcttgccggcgctgcctaccaccaccaggcggcggggtgaccgcaaggccatcacccgaaaggcactccagtggtgcagcgacaacggcgacccgtatcgcagctgagacccgggaccagccgctggggtgccttcacctgcggccgacggcgagccgtgtgcggcttgggggtgccacgtcctcttgggcgcgctaagccgtcgaca

SEQ ID NO: 460082 - DNA, 474 bp, Sorghum bicolor
cgtgcgactacttaggcttagagcttccaatagacttctcacagggctaggggcaatgttcgaattggaatgacatttcgggacgttacaaaacccccctccttaaaatagagctcgtccaaggagtataattggataagcttccaaaggataggtgtcttgttgtgatatcttatatcttatagtacaactcagagactttttcctctccaggattcaaggtataatccattgtctcaccttgacatttcggacaacaacttccagcataaatccttgtggtttcaagtccttgggccttgctgagttcaacatctttacaattccaatatttatttgatctatagagcttttggagaaaattgatcaatattctgttagatgaacttgataaacacgctctgttgagaaaggtacaaggtgctcttcgtgcatcatagatgtcttgagatctctgtatttgcttgatagaaa

SEQ ID NO: 460083 - DNA, 194 bp, Sorghum bicolor
tcgtgcgctgtgtcatagtagagtctgtagttgcatacatagagtgctcaggctttatggcaatgccttgaataccatacttggaggagaggaacactatataagctgttcacatctattactacggctcgatacgcctaagctctactcattaagaccattaagtgctgccatgatctacttcaaatgcttat

SEQ ID NO: 460084 - DNA, 435 bp, Sorghum bicolor
  unsure (1)..(435): unsure at all n locations
cgtccgattaaacgtgacctggaccttgctacccgccttgtgcgcaagctcgacaacgagctgggcgatgactacttcggtgtggcaaagattgaggagcgtgtccaccagctttctgagagcggtcagctgcagcccgtcgtgcctcccaagcctgaggctaacgacgagatggatgagggtgaggaagaagaggagggtatgatcgaggaggacgaggccgacgacgaagagctgcttactaagaaaaagaagctcgatctctnggtggagtacttacgtcgtgtctacaacttctgcttcttatgcgtgttcgagtctgactcggtacacgagcttcagcgcaagtgttcgggaggccatcttcgacgcccgcgcgcataccttacgactgctgcgaaagagaccgcccgtgcctcggcctctggagaagca

SEQ ID NO: 460085 - DNA, 423 bp, Sorghum bicolor
  unsure (1)..(423): unsure at all n locations
cgtccgctttgaagtcaagggaaggtggtgaaccatcttggttccttggttcttctggcaacaggtgttgtcaacttcatatcagcatgggcattgtgtcttgttagcagtgaagaaaatgttatctgtcacctatgatttcgttttgaggaaagccacactgccctttcctgcatcatcatgacgccaccagatgatttgctcatcagcatctttctcttgctgcctccacacccctgctacctacttcgttcttcccttgtatgcaagcattggcactccctcatcgtcgacaatcggttcctccatcgctttcaggcactccatggattacctttacttggtgtcttcaccaactccactcgcatccctcgatttctccctgctggggatcctnctaaccgtgttgctgcagcatctttc

SEQ ID NO: 460086 - DNA, 361 bp, Sorghum bicolor
cgtccgagttcttacatggctacaagcctgcacgacgacatcacagaacttcagaattttctcttggaagacgatgacgtcaactttggcatgggttcagaaaacatggcgctcgaacgcatccatgcaccagaggatattggagaattgattcatgggttcgacacgcaagaagaacttgagctgggcagcggacctgagctactggagatgcctccagcttctggtcctctgtgtcacgatcccacaatctgcaggtccaacggaaagaatgtgctgtgtacatgtttggacgctactctttctgaagccaactgactcagtacatcgtctgacagcatagtgttcttatcacgcacca

SEQ ID NO: 460087 - DNA, 284 bp, Sorghum bicolor
attggtttagacaacttatgttacagagcgcataccattgcaatgactgattgggtttataatcttcagaaggttacatcctgtttggaataacaatgattacatagttcctttaaacaatagggataataaagggagattattttaatttattattatgctccaatggtgccttcaaaaacagggataaatggaaatattaattattggtggctagaagggtcataaggtcttttgggactgattctagctagaaagggatgatcttacccattaaacgtaac

SEQ ID NO: 460088 - DNA, 331 bp, Sorghum bicolor
  unsure (1)..(331): unsure at all n locations
cgtgcggctggtggccatggacctcaccggcgcctcctcggtggcgagcgacaccattcctctcctnctgacatacaacaagcagcaggaggaggaggactatctcgcgggcgactacgactaccttgtgcgagccgtgcaacgcggaagctccgggggatggagatccgcgctcttcggtatgggcgtagagatcgccgtgagcttctcctacttatgcatctttgcaaactctgatcacatacctgacgggcccgttggggcagtctaactcttccgcctcggccttcagcaacgcctggtcggacacgggctgcctcatgcccctgct

SEQ ID NO: 460089 - DNA, 292 bp, Sorghum bicolor
ccgatcccgatcgaccacgcgtccgaccccacgcgcccgcccgcccgcccgcctccaaaaccctacaccccgtaaaccctagccgccgccgacgacctcgttgccggaaatggggggtctcctgcggctcgccttggcccgatccacgtctgggctcgtctcttgtcgcggaccacaccgtaggttatcggcggcagcgatggacgagtgctcatcggtctgtgatgtctaggactctgttgaggctgctctccttgcgctcgcactcgcgctgtcatttgtgctatacatt

SEQ ID NO: 460090 - DNA, 323 bp, Sorghum bicolor
cgtccgcatcatcatgtgaaacccgcaatttattgtctgcttagtaacatactcaatagtctagttcacactgtgtgctttaatgtgtcctttttccaaaaatctattgctagcacttgaattatcagccttccaaaaatataaatattgctctgtttttcttttttctgctcctttgatctgtgttccaagccaactggaactacagttgcaggcctgacgcatcgacaatacctgtgcagtagcaagcccaacacatctctcaagctccctgtaccttgatcttcaagaaaataacatggccacagggtacagctcacatg

SEQ ID NO: 460091 - DNA, 86 bp, Sorghum bicolor
cgaccacgcgtccggccgacttagcaactctccaagtcatgcattctggatacggtgatttctatagcgaaggtagagaatcacat

SEQ ID NO: 460092 - DNA, 153 bp, Sorghum bicolor
cgtccggatcgacttgcggattcacttgattgcacatgcgatggtgatatgcttggtgaccatcttgatgacatggaagcagactgggcaaaacctattgcaagcattagtttgagctgcagatgcatctttcttctcgtaggaaagacaaga

SEQ ID NO: 460093 - DNA, 65 bp, Sorghum bicolor
gaaaaaaaaaaaaaaaagaacaagcattttgatgaacctaacaaataaacaaaaaactagtgaat

SEQ ID NO: 460094 - DNA, 128 bp, Sorghum bicolor
gtacccgtccgattaccgatcgacccacgcgtccgtaggaatatagctgcacactctacaaggatccatagctctagcgccacttgcctgcgacccgtagctatgtatagtgtcaccggggtgagatg

SEQ ID NO: 460095 - DNA, 308 bp, Sorghum bicolor
cgtccggctagcccgtgttgcaacgctgcatgcttggctatattctacacggcccaggcggcggcggcgtcggggagcgaagtgtctggcgtcttggttgcttacgaccggctatgacaccggtcgtcgcctcggtacggcgcaggggctggctgaggagcgctgccgctgtcgcggtgggcttcaactcggccgacgaggcagataatatcgcgggatgactgctggagggaaccctgctgacctgagacggacgagtctgtcactacttcacgcgaatccacagaagaggtggccgatgggggtgc

SEQ ID NO: 460096 - DNA, 433 bp, Sorghum bicolor
cgtccgacacgctgagatggtctgacagatggtctggtgcttgtgctttcagtagccgtcgtaaccgagaccacgatggccgatgccggcgctgtcgcagcgaccgacgacaagaatgtcaacatgcttatcccaaggtgagcaaggttgagcatatcaccacgaacaagaaaagcctgataaatactgtgtcttgaatcaactgtaagcgcagaggctaaaccagatcgaaaggctcaagatgcggaaaagcctgaggaggtgctggcaaaacggaatacaagttcgtgccgtacccgaaacttgtgccagaccctgagatgtgccaaaactggccgtgggattaaccttctcaccaggattggcagtgctgtcagaagcattgttcgccagcgtcggcatcgacgcagcagtcaccgtgcacctgttcgag

SEQ ID NO: 460097 - DNA, 174 bp, Sorghum bicolor
  unsure (1)..(174): unsure at all n locations
acgacgccgacgancatgttgtcttcggcgcgctccgcgacgccttctcccggagctggctccccgacggctccttcgccagcgaaagcgcgagcccctaacgtcggacccggaccatgactactgcccctacgaccactgatcctattcataccttggtggtggagcggtttg

SEQ ID NO: 460098 - DNA, 115 bp, Sorghum bicolor
tgggcggacgcgtgggcggactcctaaacttaataaatcgtattatttattaccatacgtataactttcaagggattttgggtaatatttatagacttttcctcactataaaact

SEQ ID NO: 460099 - DNA, 250 bp, Sorghum bicolor
cgtccgggtggatttgctgtgggcatttgcttcagtcacttggtatttgatgggcagggtgctgcacaatttctgaaagcagttggtgagatggctaggggcctccctgagccatcgatcaagccaatctgggctcgggatgccatccccaacccacctaagccacccctaggtccgccaccatcattcaccgcattcaactttgagaagtcggtcgttgagatctctctggacagcatcaagcgtgtga

SEQ ID NO: 460100 - DNA, 316 bp, Sorghum bicolor
gcgtccgcggacacgtgggtcgggacagcaagctacatcaaccacatgctctgcagcaaatgatgtgaaagttggcgctagcccaacgaggataagggtctgcaactgtctcatccaacgagaacaccaactacgcttccctgtcccgcacacaacctaccttaagcactcttaggtgcgactccatgatacaccctattcaactttaagaagtcgttcgctgagatctctctggacagtatcaaacgtgtgaaggaccatattgcaagtgaaaccaaccagaactgctccactttccacgtggacactgtcataa

SEQ ID NO: 460101 - DNA, 254 bp, Sorghum bicolor
gcgtccgcggacgcgtgggttgaaaacctatattcatactggcgtgccgaacattgattcatataacctgctttctattctcaatttattacttatgtttggaactactcaatgcatattagattggtgtttttgtaaaagcatgcatggaacagactgatatcctgaagaatacgatccatgaagaagagaagaatggcagtggaaagacatggcttggcactagggatgagagttcccggttggacttgata

SEQ ID NO: 460102 - DNA, 425 bp, Sorghum bicolor
cgtccgctcttcctctctctcctccttctcccacccaccccttctcccttgttgtgggtgtgctgtggagaggagaaaggaaggagagcaagaaccaacaccaacaagagctgctgccaactcctgcacagcctgggctctcatcactgattgcccacctattaccttcatcttttgtgatttagaatcacccatctatcccttatatatctaccttttctcggtcctctgtaaactctctcgtcttctaggtttcacaggcctcaagataggcctctggacctaagcttgcaagcagctgctgttcttggttttcttgattcttggttttggggttcttggatttttgggttcttaagtttcttgtatcttcccccaatcttgcaaaatcttgtgaagttcttttcgctgttggggaccatgga

SEQ ID NO: 460103 - DNA, 288 bp, Sorghum bicolor
cgtccggttaaatctggacgacgacgatggactccaggatctcgacttgatgggcctcgagatccccatggatgacatcaacgaaataaacctcatgatatagctgtacattttctttcatctcagcgggcccccatagaaaagctcatgatatagtgcacaggtaacatgtgattttctcacagtaaccaccaaaccagcagttttaacaccaggcctgttaggcttcacttagttttgataaagaaaaagtttatagagacctcttgacaatcccaacaaccgcat

SEQ ID NO: 460104 - DNA, 403 bp, Sorghum bicolor
cgtccgtaagagatgcagactattgactcactgcacatccttgttgccgtacatgcagatgtctactctggtgctcggcctttgttggagacgacaatgaaaattactggttgagggtttgcacaacataccacttattgcatcttcatggagaataacaccaaagatattagattggtcgatgcgaacggcatgtggacactgatgcttctgcccgagtattcagagactgtgctacaaacatacttctcacccgtggcacaacaggctatgaaatccttacatgagcttctgatggacaaagactcttaaagtgtagcagacaccctctcaaatactgcactccaactgtgaccaaccctgggcactgcatactcagcatcatatggacaaccatcgccat

SEQ ID NO: 460105 - DNA, 430 bp, Sorghum bicolor
  unsure (1)..(430): unsure at all n locations
cgtccggtgcccttaggggcaaagaaactgtgttcccctttgcccattgcctggagatcgatgcatgctgtcttcagttcagtccgatccatgcatgcatgggtttttgctgaaccggtggaactgaacaccatcctagctaattaaaccgtacttattttattagatgcgtattatatataacaatgtatgtatgatgagtctgatgttttaaaaatcaatgccatctatatgtcatgcatatatatatatcatcgtggtcatgcatgatgatcaggttgtgatcgagaacaagcagcattacaaggtgctgggcaaaggcggggacctgaccacactcatcangctgcaggtggagaacggcaaagtggtcaagcacgaggattgggacgtctcgtattattcattccgatataaatacattattact

SEQ ID NO: 460106 - DNA, 117 bp, Sorghum bicolor
ttgctttcagccatggcgacagctgccgccgccgctctgctcgtcgccgccctgctcggctgctttgtctgggcgtaactataacaccaaggtaccgacaactactacagcggtgac

SEQ ID NO: 460107 - DNA, 182 bp, Sorghum bicolor
cgtccgctctctctctctgctcgccacgcgccacatggctcccgcgttcactagcctcctccccgccgcgacctccgccgccgcctcgcggctcccctctgccgccgccggagcggcatccaccttcgcgcgtctcccgcatcacccgacgggctgggctggggcctccgtcgcggcgccgc

SEQ ID NO: 460108 - DNA, 326 bp, Sorghum bicolor
  unsure (1)..(326): unsure at all n locations
cgtccgccaacactatctgccagagaaagaacttgtcatccctgatcctcttctgcacttcgttcagtcccatggcgctgttcttactatcgatcaaaatggccgggtcctattctctggcaacggtgatgagatgatagacttgctctcggtcttcctggagttcaacatgtctaaacgagaaactggtggctgtaaggctgcatttcttgttccatactttgagaggaaaaggcgttctcnggctaacagccaagtatccaatttaaaattagcaagcacagcagctgatgtttcaaaaagtactgatgtgaactcaaaatctt

SEQ ID NO: 460109 - DNA, 299 bp, Sorghum bicolor
cgtccgcttctgttacccatctcgccgcatcgcatggcggcgccggccctcctccctccccctaccatggacgaagaagcgccgccccgcccgccccagcgaccccttgccccgccccacccccactccagccggagccgaagcccccgctcctgcgccggctcccgcccgtgcgcgtgacctcagagttcgacggcgtcctcaagctccgtctccgcattagccatggcgctgggggaggagggatcccctgcggcccgtccgaggctggggttctggctcggaactttttcattgat

SEQ ID NO: 460110 - DNA, 216 bp, Sorghum bicolor
  unsure (1)..(216): unsure at all n locations
aatttctgcgtccgcccgcgcgctccgtgaccgtgagactcggtaattaaaccactcggcactcaccggccgcgaccagcagctcaactatctatccccttcgtctcccaggagtcgagcgagaatggccgccgccgccgcccttcgtcctgctctctcccaagcagcagggccagagcagagagcttccnnnctgctgtgcacaccgaaagcaca

SEQ ID NO: 460111 - DNA, 463 bp, Sorghum bicolor
tcgatccctgtcgaccacgcgtccgtcataccatcgatcgcgccgctgcaggcgacggccaggagcctgcactcccgcggatggacgaactggggccgtggctcgctcgttcacggcggatggactaatacgacgctcctgtgttcgaaggctgcattttcgtactgcgctggctcttcttatcatcctgttcctcgggcacctacccgcgcttctccggggggccaacgcacacggtcgtcggtgtctgccagacgccactgaccacctccttcccttctcccaccccttgccggatccccgcctcagcatcgtcatcgtcaccctcgccgacgaggacgccggcaggccgggcggacggcagtccttccgcggcgtgctggcggcgtacgcgcggaacaagcgcgcctacgcggaggcgcacgggtatggcctcgtcgtgctccccgcgttcgccgtcgac

SEQ ID NO: 460112 - DNA, 364 bp, Sorghum bicolor
gtcgaccacgcgtccgaccacgcgttcgctcaactcagactcggctcatttacttttcttagagtcaagctagtattttagctcattaagttagtgagctagctcaagctggcttgcaagctagctcacaagctaaacaagccaaataatttatagctggacaactatatgagattagagtctagaattgatgtatgccacacttatttacttgtcgttgaataaattagtatctattgatttataacagcgtcgtctcatgatagaagaaagagcacaaaatttgctcgaatttgaatgtgtaaggagcaagcgaactaaagagaaccttctggtctcttttgcagcgatcgacacgacactg

SEQ ID NO: 460113 - DNA, 180 bp, Sorghum bicolor
ttcccggtcgaccacgcgtccggctgcacaccatggacaacatggtccatgatctcacgaacggctcatatggcgcactgtacaaagcacgggctatcataacccaggaacttgaggctgtcaagatgatgtaactcacagaaggcgaacaaagatatgaatacataccgggagaaattg

SEQ ID NO: 460114 - DNA, 314 bp, Sorghum bicolor
cgtccggaggtccaattctctactactgtttaaaaaaagtcatgctgtcacagatcacagcacagacctggattatggaagtttttgacagggttaatcagtgtatacaatgttacaagcagtaattccacaggtgaaagcatttagtgtatttacagccagtctccggtatcatcactttcatccttctttcctttcctcttcttacagaaagacagtgccagaaatacttctcattaacatgaacatccctttcatatctgaaccatcttatgaacgatgtttcggcattcttccatgtcagatacctaaac

SEQ ID NO: 460115 - DNA, 349 bp, Sorghum bicolor
cgtccgcggacgcgtgggcgagagagagagctcgccttcgcttcccttccgttccctaggcaaggcaagggcgcagcgcaaggcaaggctgcaagttgcatttgttccgtgatgagtgaagccgatgatgcgatgcgttgacaggcagaggcagcggcaggacacacatgacattttttttaattccttcatcttgctcgtttgaagcctccaaaaccaaacacccaaatacaacgttgccgctgccataggccagagcaagacgagtttatgcatgcatgcatactcgatttgtccttttcttttatcatcaatccaggagaatactatatggcttcaatttttcttt

SEQ ID NO: 460116 - DNA, 75 bp, Sorghum bicolor
cgtccgtgcacgagacgaggccctaacgacgacacacggatacggatccattgatcattgcactctcacatctga

SEQ ID NO: 460117 - DNA, 299 bp, Sorghum bicolor
agctgctgctgcgagcctgcgacctccgaggaggcggagcaatggagttatccactcccatcgggagctcccttgctagaactgcggccatggccctcgtcagccccaacctcaaggttggtctgcagataaccaatcaaatgtgtgtgagggggatgcaacttcagtgccaattttctcatagactaccatctgtatcttgttcaatgttgttaaacacacaaccttcacaacgaaccaaccataaagattgtggtttgcttcaggtgcaatgtacacaaaaacctgatgcagtcgtc

SEQ ID NO: 460118 - DNA, 483 bp, Sorghum bicolor
cgtccggaaatggtagggttctttggcacctctgctgcatctgatcactgtcatttgctaccaaaaaatggatcagttcaccatgaactgataagaccacaccataacagatcaagaagtgtgatcaggtgctgcagcgcagcaaggggaaggaccagggattattactaccaggtgctcggtatcacagttcattccacacctcaggaaatcaaggaggcttacaggaaactccagaagaaacaccatccagacattgccggctacaagggtcatgactacacgctgttgctgaacgaggcatacaaggttttgatgcgagataattccatgcatgctggtggaaggggcaggagtatagatgggggttaggaagcggtccctggggatggatacagttcttggaatgggcctgttagaagtcaagctctctttggggatgagaacaagtgcatatgatgtccggagggcgtgcattatgct

SEQ ID NO: 460119 - DNA, 106 bp, Sorghum bicolor
gcgtccggacgatttgatgcgaaatgggacattggagaactttgagaggctaaggcctgtaaatatctagcacttacacaccggccatgcttggagttatatgcac

SEQ ID NO: 460120 - DNA, 412 bp, Sorghum bicolor
cgacccacgcgtccggcctgccaggccggccccagttccaagtgaccgaacaggtctgcgggcccttttttcgtcgtcctctaggcttcctgagatgcctgccaatcttttctgcgctcctactcggctggagctgatctgcttgactcttttcagagtgtgagggaaagctgacctcgttgctggtctaaattaacggatgagccttgatatgttatagcatggtatgctccctaatgacgcagttatagcggtattgggtatgagcatgatagttttgtgagtttttccccccttcatcgttgattacagtaaagctaggatggaaaccaaattaaacaaaatcgttctggtgtgtcgtgatgttacagatataattataaaaccaggccaataaagtctcatgatttat

SEQ ID NO: 460121 - DNA, 273 bp, Sorghum bicolor
cgtccggtcacacgccgcgatccatccagctgaggactcatcatcatcaccaccgtcatcccagctactacctactaggctactagctcgccgccagcaccaccgacgacggccagcagcagcgggatcgatacgacgacgatgggggagagcaagctggagagcccgctgctgggtctgtcggcggcggcgtctggcgggccatcgccgggcagcgggcacgggcacggcggctaggcagctagcgggcagcttgagaacatactgagcgac

SEQ ID NO: 460122 - DNA, 356 bp, Sorghum bicolor
  unsure (1)..(356): unsure at all n locations
cgtccggttggtgcatgagctgaggtctccacgagcatggatgctcctcctcttctgcgccttgcttgcacgccactctttggccatgttcatcagtgccaggagagcgaggaggcaggggcaggcgcaggtgcaggcgcagctagacgacgacgaccttctcctaccgccgccttcgcctccagctctgccggtgctgggccacctccaccacctcgtcggctcgctcccgcacgtctccctccgcaggctcgcgaggaagcacnggctcgacgtcatgctcctccggctcggcgccatgccggtgctcgtcgtgtcgtcgccgcgcgccggccnagcggtgctgcgcacgcacg

SEQ ID NO: 460123 - DNA, 190 bp, Sorghum bicolor
  unsure (1)..(190): unsure at all n locations
tcctacccaattatgttcacaatctctgatgacagagtgaggaanatgctatgctgggtccctatgtctacaatattgaacatggtatggagtgtgatgtatcttttttgggaaagccatcttctcttatgactattattaattgcatagttgccaccatgctggattgtctatactttgtctgtagcta

SEQ ID NO: 460124 - DNA, 402 bp, Sorghum bicolor
  unsure (1)..(402): unsure at all n locations
cgtccgcctgctcctgtttcactcgaagagctgaaacctgaacagaatgaagctgaccaaccagagagcattccctgtgctgtcgttgaatgtatggaagaagatgcagatgagttagcttatgcatatccatgcatagcatagtcagaatcatctgattctgaatcatccgatgaggatgaccctggaaggatatctgtatctggcgaggagaactgtgatccanatcctaaatataccaggagcacttcattcaaggcagatntttttaggtctagcagaacctcagaggactntgccacatggcagcgcattataaggttggatgctatccggtcaaacagtgaatggattttgttctctcgcaaccaacctgaagttcccaaggagagagcattgcag

SEQ ID NO: 460125 - DNA, 155 bp, Sorghum bicolor
  unsure (1)..(155): unsure at all n locations
gtccgaatccntgtcaccacgcgtcgcgacagcccgcatcgcggagagccggccctgcccgtcatggcctggagcgcgtcccccgacatccgtcgcaggcgggtggccgatgtccaccaccattatccgtacataagcgcccgtatcatcctgta

SEQ ID NO: 460126 - DNA, 433 bp, Sorghum bicolor
cgtccgatcactttgttcatgtatgttatctgtgattcattggtccgtgttaatggactctgtaaaatcatagttttgttgtatgatcagacatttaatttcttaggctgcagtgtccactcatgatttacattgatttgttggtttttcaacccagctcggtagtggccagtttggtctggttactcaaaatccttctttctcgattatagatgccacatatgtgttttttagttcctttttaattgcaacagccgacataccttgcttacaggtacttctatatgtcagctttggagctgtgtcctggtccttggaattgccatcgaccagatcggagagggggagcaacaacgacagagttagtgagtccacctggatgcaacttttgcaacttatcagccaaacgaacaagacgagtgaatattcttat

SEQ ID NO: 460127 - DNA, 137 bp, Sorghum bicolor
cgtaccgctcatagtaatgtataaacattgcactgccgcaaccatgagttgatgcagatgcaggtaaagatagtgccaattgtacctgaattgaaaaaaagcatattgctgcatggaacgggacaggggattgttgc

SEQ ID NO: 460128 - DNA, 347 bp, Sorghum bicolor
  unsure (1)..(347): unsure at all n locations
cgtccggttatccttactgtgagcagtctgagggcgagcgactccagtgagaggggggagagctgttagagcgagaggatgcgctgngatggcaagcgcatgcatggcgccatggcgtctatctccagctccgagaccggagcggctagcaccagcagattctggggcaaccggcttgccacctactgcgagccgaatcctggggtaagatttatggataagatatgcccaactgaaatgaaacttaagagaatggagcgaaataagactgaccaaacagtcttactgtgctatacaagacgcatgatatgatagtagacactacacaagtcattgcatgccgtgag

SEQ ID NO: 460129 - DNA, 488 bp, Sorghum bicolor
cgtccgcccatttgcatgcctatcgttctgtctgcggccctgtctgtatcttttgctgtctcctcgggcgccgccgcgcgctggtgatccccgtggtcatcgaccagcagcagcagcagcagcagccatgtcaggctcccagctgtgcaccgactggtcctcctcggcgctcgccagcagggtctccaccacccagcggcgcggaagatccggcccaagctcgggccccggggtgggcgctgtggtgcgattcccttcactacgaactgacagcagcctcatacaatttaatagccaactgaagagatgcgactatgacttacaagcctggaggaatctggtggagccacgagcgactgctgagcttaggaagggctttgacatcatggatctagacaatggaatcggatgggaactcctcacgtcaaagggccgggacaaagcacggcaaaggaccaatgctgagggtgcaatggcacacccatact

SEQ ID NO: 460130 - DNA, 372 bp, Sorghum bicolor
ccgatcccggtcgacccacgcgtccgtctctccctccactcatcgcgtggccgttggtcgttagcagcagcagcagaagcagcgcggggggcaaacagggggacaaggcaaccgggccgacgagacgaacaggaaaaggaagaaagcgtcgcggagcgatggcacttggcggccttggcgtgcgagcggcgcccttcacgtacgcggcgcacgcgctggccgtcgcggcggcggccatggttctggtctgggccatccaattcctgggcgggctcgtcatcgaggtcaccaacaagaaccttattttcaacgttcacactgtttttatgcttatcggatatattattatcggctgggaagctataatgggat

SEQ ID NO: 460131 - DNA, 204 bp, Sorghum bicolor
cgtccgctgaaccaccgggcatagttcgcgttcttttgggcattggcactcgacatcccacggcatgagcatgatctttgtagcacgtgtttctgagtcaacgatctacatggcttactacacaatcgcacatgatttgctcaatgtgcatatgaatggtaaagaaatctatccagtaaggtcagaaaaaatgacagatgaagt

SEQ ID NO: 460132 - DNA, 480 bp, Sorghum bicolor
cgtccggccgcagttcgttgcccgattcccacccgccgatctctctctctacatcttctccaccttcgttcgttcgttcgcacaggaacggttgagcacaaacgagcagccactctcgaatcccgatcgcgattactcgccgcggcatcagtactcccagccgccaccatgagcagcgggaagcgatccttcttcgcgcccaagaagaaggcaaccaacccgttcgattccggctccgacgacgacaaaccgcagcggcgaccggcgcgggcttcctccgtgcctcccccggagtcggacgaacaacagcgagggggctcctctctctcgggcagcgccggcggcgacagggccgggctcttctcctcttcctcgaccaaccatcactaccggaacgacttccgcgacgccggcggcctggagaagccagccgtgcaggagctggagggctacgcgggtacaagggcgagggaccacgcg

SEQ ID NO: 460133 - DNA, 554 bp, Sorghum bicolor
  unsure (1)..(554): unsure at all n locations
cgtccggaagagtccaagtcacatggtagaagtcctaatcacaacgatagaagaggttcttctgaccggaggggcagaagaagtcctgatagcgatgatagaagcttccgtgagcgtgccaacagaagctctcgtgagcgctccgacagaagcgctcgtgagcgcggcgaccaaagatgctcaatggagcgcaaagacagcagttatggcatggtatccagtgcttctgatagaagctcagctggaccatcagagaagcagctgtatgacaaacaagggaagggtagattccatcctgtttgtggggtcaagaaggaacctactcggaaagtcaccgcagatgaagctgctgctatagtaatggcggctactcgtgggctgggtgctgcaaataactcacttaacaccatgaaaggaaccaatgacaatgttcgcacccatgcaagtaatgatccttcttccagcttttgaagntctcatctttacaggaccgagatgcactgtccaaacatatttcaaatagtggaggtgatgcttcacttacaagtagtgga

SEQ ID NO: 460134 - DNA, 122 bp, Sorghum bicolor
cgtccgcacgaccaccaccgccagccacaactatactcacacgacgaggcctgcagacagtgcgagcgaccacgctgctccgcgtggcttgcactacaacttgtgcccgccacgcgcgatct

SEQ ID NO: 460135 - DNA, 408 bp, Sorghum bicolor
cgtccgcccacgcgtccgaagcaagcaaaaggttgtgtgcttatataagctgtaagcagttgcgagaagtcgatacatcaaaaatactagaagagtgtctatcatcgaatcctggacaagaggaactggcaaaggatctttatgttcctcgagtggaggataagaaccgtaatatgcggatgctcaaaatcaccaccatggatgatttagttaagaattcaatgaacattctggaaccgtcacctgtggatgctactgggaaagatcgcgaagatgtattgtcatcatcttcccctgttgatcttttattattgccaggacaagcttttgatagaactggtcgaagactgggacgtggttgggggtactatgacacattcttgatgaaataccaagaacttgcaaaag

SEQ ID NO: 460136 - DNA, 376 bp, Sorghum bicolor
cgtccgcagacgcggccggatggcctcggactagtaccggtgacaaagctagatgcgctacatgggtctcaagtgtcgagccatcattatcaacaacaggccgcggcagcagcagttacagttccaggagcaggccgcatcatgcgtcgcaagagtgctgccaaggcatgccagtcggcgttgacagcccctggtacgacgtcaacctgatcctgtacctgcttatcggctccatggagccttcaagcttcctgaccatcaagtgccacagcctctacgggttctacattttcagtattggcgaggatctagagcatcttttcaagaactcgtacgttaactttaattactggctgtgggtatatacttggtacct

SEQ ID NO: 460137 - DNA, 470 bp, Sorghum bicolor
cgtccgtgtatttaggcgggttacttggtgtgtagaaatgaaaagctagtaacaatttcgattgtttattgttcatatgaaattggtttgagctccaacattttctttgtgtacaaactaacatttataatgctctagtggtattagttgcaaaaaatagaaatttttaaaaaatgctctagtggtattagaatcgtagtgttccaaattggaacaatgatatatcggtagatttttttgaatttgcaaaataccaaatgatgaatccggttaccggcttttgtcatgcaacagaaccagcaggttaaatcatcattagggaagaactttagccttttttcagattacaaggcaatggcactaaggtagagaagcaagcgtgcatacgctccaatagatacgcactgaggatgatatatcttggaactgcattgtaccagtgatctcagttctttcacacacagtaaaca

SEQ ID NO: 460138 - DNA, 375 bp, Sorghum bicolor
cgtccgcaatatcaaaagcattacttgtgaccgattgactgggaagtgcatgtgttctattggacgagtgtagagaaatctgtttgtgtaagggggtatacgcacgacaacattcttctagtgtcataatatgtttcctaactttgtcttctaatcatacaggacgattactcctgatgtgaagtatggtcgactttttggtttctacactcagactatcattgtggatgcaaatcattgggttttcagtaaagccaatgactacattcttatcgattcatatgtatagatcagggcctgcttgtattatcctacttttttagaactctaccattattctagaaatcgttgctaaagctctaaatctgagactct

SEQ ID NO: 460139 - DNA, 146 bp, Sorghum bicolor
cgtccgccttccgttccactcccaggctcccactctccccctaccggctacccacacacacacaaacagccactcctcacctcccccaccctccggggcatgtcctgctgctccccatgtctgccacactcgagctcgactacata

SEQ ID NO: 460140 - DNA, 311 bp, Sorghum bicolor
cgtccgaatgggagttcgtcacacgcaatacatattgatgttgacaacaatactacgactgaaaaacgcttgacatcgacaaaaaaggacgatcttagatcggtcgctgcttcggtgaataattcaaatgatccactacaagccaattatcagacgaatgatccatactggaaaggtgtagctgatgtatttaatagcaccactccaaaagagccatcacgacaggcaaacaaatgaaggctcactttggaagaatttacaaaagggctgcttggactcgcggtgatccgaaggaggccaatgctatgtgg

SEQ ID NO: 460141 - DNA, 498 bp, Sorghum bicolor
cgtccgcccacgcgtacgaattgctatggtcttacaagctttctttcttggtcactggacattgagaactgatctgctcaagcacacttagatcaactatgattaagagtttactgaacttgcatgataatgttcatttcagtatgcctattatagatcttctgagctgaagctaggtttcaagtattggtgaaagccatttgatgaaatgaagctaggtttagtgcaagtgagccaatttgatcggtcagaacgtagaatagccccatgtagcggtaccaaatggatcccttatgacagagtggattctctccatttttgcatgtgtgacatgaatctttgatatagcttgctcggaatcgattgctgctgctgcaacagcaaccactcctacctcttcataccctgaagagacctagcagcggctggtgtagtatcgcagctgtgcacaggcagaaaggatgagacttggaataagaaattattctgctaaatacg

SEQ ID NO: 460142 - DNA, 163 bp, Sorghum bicolor
cgtccgatccactagtctagtcaccagcctactaatccctcttattatacgtaaggttgctcgagaaacctcaatacgtattgctgattgtgttgatggagatcgacagcgctcttcagtgacaagtgctgttattctgaggctagatccatggatgcaagtc

SEQ ID NO: 460143 - DNA, 106 bp, Sorghum bicolor
cgtccgcatgcatgcatgtgcacgcgggcatatgtacctggaactgtgtgtacttacagtatactccagcagtataataatatgataaaatatgagaatagtcaaa

SEQ ID NO: 460144 - DNA, 147 bp, Sorghum bicolor
cgtccgggccgtcctttttttttttttttttttagagctgtacgcatttgtcagtcatcatatatcacaatcatacacaggtcatatacacacacgttacacgaaggtacatatagaaccgttattatcagaacgatatcatgacgt

SEQ ID NO: 460145 - DNA, 262 bp, Sorghum bicolor
cccggtcgaccacgcgtccgaactatcgagattttgtctgaacctctatgcgcagattctctatgccgctctcgctagggtgagcaggggactcttagctagctcgctggcgggccaggaggcaaccgactgcccgacgaaatggggatgtggaggaggacatgacaggatactcgcgcacagacgagtactatgacaagccgcaggacgaccgcatcacggtgaagcccctgtacgcccaccacgacatggcttgctacaa

SEQ ID NO: 460146 - DNA, 304 bp, Sorghum bicolor
  unsure (1)..(304): unsure at all n locations
cgtccgagtgaatctctagaatcattttagtcacacaatatctggcctgagtaactatgaacctggccataacaatggtgaggcgaagtcccttacggaggtagcactctgcaacgccatgagatcactttacaagcgggaattgcaagatcacaatatggtgtgcataaactaactccagcacgcttgggatgctctcatagaccgngactacgctgaggacgggcacaaagatttcggtgggtgcacacattcgatgaaggaagcaggctctgctctaaatgaacttcttaaggatgatggg

SEQ ID NO: 460147 - DNA, 95 bp, Sorghum bicolor
tggaataacaagagcaactgatgaaacctataataatgaactaagaccacatacttggtcatggaattttttaggagcatgatgactatgcaagc

SEQ ID NO: 460148 - DNA, 318 bp, Sorghum bicolor
cgtccggccccggcaaagcaatggcgctccggctctctgctccgttcctcacctcgcgctttacgccgtcgcaggcgtcggccccgcgcaggcgcacccgggcccgctgtttctctccgtccgccgatgcgcgggccgcgtgtttcaggagaccctacacgtccgttctgattgtccccacgggcgtcggcgcggccgtcgggggcttcgccggcgacgcccttccggttgcgcgagccctctgcggcgtaggcgactgttcatatacacccaaacgtgttgacgctggatgctgactggccgtgccgatacacttac

SEQ ID NO: 460149 - DNA, 319 bp, Sorghum bicolor
cgtccgagcgaacgagttgtctctcacttgaagataggagaaggaggaggcatcttgaacaggatgaagatttagcacataaaataagggatgaagaggaaattgcataagcaaggaggagggctttatagttgcaacggcaagcagatgaaacagctgcagccgcaattgcacctgctgaagaatctgctacacttattgaggttgatggtgacgatttaaaggaaacatatgcacaaaacaagccagctgttgtggacgctgataacatactgagctttgataaatgtgttggtgctggaggacttgcttatgaaaa

SEQ ID NO: 460150 - DNA, 200 bp, Sorghum bicolor
ccgatcccggtcgacccacgcgtccggagggcgggagcgcgactcggtggggatggctttgctgcaaagccagagccgcctgcccggcattggctgcaacaccagcatcctcttggcaagagctagggtgcaacagtgtctggcagcggcgtcccactcacgctcgccctttctgcgagctaatggcggcaggaggagca

SEQ ID NO: 460151 - DNA, 268 bp, Sorghum bicolor
  unsure (1)..(268): unsure at all n locations
cgtccgcccacgcgtccgcaaacaagctcgacgacacaaagcagctagcatcgtagccgcccagccgcgctaaaaaccagccagctaaacccatggccgggatcgtggtggtgttcgacttcgacangacgatcatcgacgtggacagcgacaactgggtggtcgacaacctgagctataccgagctgttcgagcgccttctccccaccatgccctggaacacgctcatggacaccatgatgggtgagctccacgcggccggcaagac

SEQ ID NO: 460152 - DNA, 251 bp, Sorghum bicolor
  unsure (1)..(251): unsure at all n locations
aaggtggctcaagctagtgaccagtcagagctgaatgatgacttctgggcagagctgttggtcgaagatttcggagacaaggcaggacagtcagagttggagggaagaactgaagacgtggatgaccttgctcaacaactggggtatctgagtaattctagcccaaagtagagtcagttcctaatggttgcccncacaatcactggtgctttccccactactgcagaccatcctgaacanactgttaactg

SEQ ID NO: 460153 - DNA, 470 bp, Sorghum bicolor
  unsure (1)..(470): unsure at all n locations
ccgcaaccaacgannagtccanntaacggaggggctgttcatagnnctatccctcgcaagacccagtagaagaaacgngnnagtaccaacgatgcntnngctgcgaagagcagcgagagtcaaagagggaannaccttgttgcctcaaaacaaggcnntaatgtaagctgatnagcggcttgccagctaaaatatgatagctgacacccgaagaaggggcacccttaagaaggatgcnagcttgctactgggctagcccagtaaaatggatgaacgaagcctctcttaagagaaccttgttgagtatanncccaaagtgatcaagtacggggatttcttttggggagaagttcaagcacacaagcttggctgaagtgggacgactcctcgaaacctcgctacaaaaaggaaccaaaggcacagatagccactgtgcgaggtcaggaaaaagcaaagaagctgacaccgcg

SEQ ID NO: 460154 - DNA, 116 bp, Sorghum bicolor
cgtccggccagacgccacggggcgactagatggcgaccgctccgacaccagtcatgaacggttacgcacgtgcaccctccacctactatgacgggggaactggcttctacgactgc

SEQ ID NO: 460155 - DNA, 156 bp, Sorghum bicolor
cgtccgggccaggaccccagcacatcagacaccacgccatggcgctgcaccacctccgcctcgcgccgctcgcgctccttcacgccgcgagcgtcccgcctctcgacttctcccgtattgccgcgagccgccaccgtcacgttctactattcgagc

SEQ ID NO: 460156 - DNA, 613 bp, Sorghum bicolor
  unsure (1)..(613): unsure at all n locations
gaccgtccngattcccggtcgaccacgcgtccggtccactcctaccgcacgctccgcgacgcgatggccgcgctccgcctcgcctccttcaccctccgacccgccgccgccgcggcggcgtgcgtctccttcggtgcgaccccacaggctctcctttcctatcttcttattccgtactaatcaaaatcatatcttattttctttaattaaaataaatttcttatataatttattaaattttatttataatttttttatatattaattttgttttatatttttttataattttatataataattataattattttttaattatatatattattattaaaattatatatattaaaattattttcatttgtaatataaaattttataatattttaattaatatttatataattttctaaaattttatttataatttgatgttgtataataatatattaataacataaaatatctttattatatataatataaattattataatattttttatttaatattaattatcattatattatatttaaatttttattttatatatatttatatttatatattttttattattttattatatatatattaactttatatttt

SEQ ID NO: 460157 - DNA, 411 bp, Sorghum bicolor
  unsure (1)..(411): unsure at all n locations
cgtccggtgctttctgtggtactgttggacagaaaggtgatctaagtatgatccatgcttttgtttgaactgaatcttctcgtcatgtttttgcatcaatcatgaccattttgcactgcttatttgttgtcatgcaaacctctgtatgggaatgtaactctttacattgtgttcataggtttcagggcatgttctctttccgtcatgttttactattattatctgtccgacaaggaattagtttctggcgtttattgctttcttgttagttatgatacagtttatgtggcagttttccctgacaacgttttaaatcctcagttgcttttcttttatgtgattttgntttcaggctgacatggtaattgtaccagctacaactgggtcagatgggtgttattgccaggccat

SEQ ID NO: 460158 - DNA, 73 bp, Sorghum bicolor
cgtccgtgagcgtacgatataggcgcacgacaccacaaccctcaagcgcaccctgaagaggctacagacactg

SEQ ID NO: 460159 - DNA, 141 bp, Sorghum bicolor
acgcgtccgcgcacacatccgtacaacggcaagagccaacccgtcgttactacgacgactactacgacctttgttgtctggatacaagccgcagagcctgagaacagctcgcccgagatcggctgccgtgcgcactctgct

SEQ ID NO: 460160 - DNA, 186 bp, Sorghum bicolor
  unsure (1)..(186): unsure at all n locations
tnttaataagaactcaaaaaaaatgtcgtcccttctgaggccaggccgagggacaaccgcacaaggattctcattgtgcattacattgcacacaccacgaatgctataatataggccagatactactgctctttgcttctacaaaactacatctcaagaagtggccaatctgccacgttttgaaaa

SEQ ID NO: 460161 - DNA, 316 bp, Sorghum bicolor
cgtccgatatcgaatgagagacctccctgttcgcttgagcttttcaaccgaatttaacagtatttttctcttacaattattcaggcagcaatgctttatgtaatagcttatcatccaaacgaataatgtggagtgttatatttgttgtatctttcctgtcatcataatataagaaggacataagaaacatgcttctcacttggcagagcggtatatcatatctaacctatatataatagttcgcctcccgaaattctttccagattttcttctcatattactaaacgtccatgttaatgtttttctccaacacttt

SEQ ID NO: 460162 - DNA, 293 bp, Sorghum bicolor
  unsure (1)..(293): unsure at all n locations
cgttcgcacgcatatacattacagtgcacgctataatgcgagctatatggccggcgacatcatggctatcaccatcggtgtgatcgtgggcgcgcttgtcaccaacaccaccatcgacatcttctgtgacggccttatcatcgtgcgcttgactgttggcaagactaatgcttggcgatttgatataccttgtacagggcctgccgcgggctgtacctgggtccgttccttggtgcgccctcaggctagctgaccggttagntaccggctactacagttgggacactggctgg

SEQ ID NO: 460163 - DNA, 151 bp, Sorghum bicolor
cgtccggcaaacaaaagctccactgccttgtctgcaatggcgtctggggctatttccactagcgcccttcacaccttctagcttggcggcctaggcaactagactccactcttccttattcgctttttctgtcaagtctcatctatcttcc

SEQ ID NO: 460164 - DNA, 98 bp, Sorghum bicolor
  unsure (1)..(98): unsure at all n locations
cgtccgagctgaggcatcctaacgaacgaacgatttgagaggcagcagcaaaaaaaaaaaaaaaaaaaaaaaaaaatttncaattagagaatgaaagg

SEQ ID NO: 460165 - DNA, 573 bp, Sorghum bicolor
cgtccgcccacgcgtccgccaaggcctccaatgcaatctgatatgctagctcctggagccatgagatttccaccacctccgccaccaccagattcaaggccaccccttatggctccaggagttaccaggccccctccacctcctccaggatttccgccgtcccaaatgccaatgccaccgtatggtgtgctccctggtccgccaccgatgcttaggcctccatttatgccaggaccccctatgcaactagatgagtttgctgccttcgtaccaaggcctcagttaccccagcagccatcatatgttaagtcagctgccccaacagttgtaaagagaccattagcacagcacactcctgagctgacggccatggttcctgcatcagttcgtgtcaagagagaatctgctctccccaaaccgaaaccaaaggtgcagcagcagcagcagtcatcaacagcatccatttcaaagccttcggtgaccctcataagaagtgatgcccagccttcttcagcagcgcccaagccgccaagtatggatgattcttatatggcattcttggaagatatgaag

SEQ ID NO: 460166 - DNA, 489 bp, Sorghum bicolor
cgtccgcggacgcgtgggtaaattctctccgtccaaaaaggcaaaaacacatcctcccgagaagttctgtttggccttttaatcttggtgtacttcaatttttttttgtttcttggactcatcttcttgtaaggttgcgttctgagcttctgattggaggccgccatggatgaggtcccgggaagaagtagctccgtgagagctacaaggagcatctttggcgaaagcatcggtgggaggaagccggagacgaacagggcaaggaatgttctaggacaacagcagaatttgtcaccggagatcaagcagctagcaaaatccaccacgggtaagctcaatgaacgcaaggccgccgtggacagagaaagagccggcgccgagtccgagctgtcgagggcgcgcgccatggcgaatgagctggagcgccaaatcgagcaggccaaagccagggcgtcgtccaagaggtccgagccccacgcatttcgggcg

SEQ ID NO: 460167 - DNA, 79 bp, Sorghum bicolor
cgtccggcagaagcagacgatgctgcgaatactgtgaacctgaaccatgtctgtagacactgagtgagctagctagcta

SEQ ID NO: 460168 - DNA, 291 bp, Sorghum bicolor
cgtccggacttgccgcacacacgtaatcgcccaaaaacaagctgaggcatccattgctacctacatcttccgtgcgctggtaatgctgaagatccccatgctgacacatgcaagctaaatatgctcagaagactgcagcgattggagaccatatgctgcgcaagcgctagcggcttattactaatggttcgacgaggctatgaatccttttgatgcgagcgaattcatcgccaggcacacatggtgcaatctgaacgtgtaagctccaggatgttgatgatacactgatgg

SEQ ID NO: 460169 - DNA, 154 bp, Sorghum bicolor
cgtccgagataccacacagagtcagagagagggagggcgggagcgcgactcggtggggatggctttgctgcagagccagagccgcctgcccggcattggctgcaccagcagctatcgttctggcaagagcgagggtgctacactgtctggcaac

SEQ ID NO: 460170 - DNA, 420 bp, Sorghum bicolor
cgtccgagcacgcgtacgagcagcttgatatacagcacgctatcgaacacaccatccaaccgtacgtacgtccatcgctaggtcgttcgtcatgtcctccatcttctctgccactatcaccgtcgcttgcgccttcgccgcgccggtcgccaggacggtggccatgacggtgcgcttcactgtgcgcgcggctgtcggcacggccgccgggaccgtcgccgtgagcgtggtctttagcggccttgttatcggccgcgacatggtccaggacgcgctcctaggcgcacacggatgcgagctcatctagtagaccagcgaggtcagcgacaacgtcagctacaacatcaacttcaagaacaacgacagcttcccgtacaacgaggactacgaccacgacgaagtggacaccagcaagaactc

SEQ ID NO: 460171 - DNA, 402 bp, Sorghum bicolor
cgtccggaactcttgatatctcatgtttgccaagcaggcaagtgtaaatcgtggtctgtgacgcctcagatgccacttactactgcagagaagattatggactctcatggtgtggattaccttcctgtagtttctgaggatgctaatcctcaggacagaggacctttgataggttttgtagacagagaatgcattgccatcgctcgaagggccaccgcaacaaaagaatttttcagttctatgtatgagataaaaaaggaagagaggtagcacgaaaggaagaaatgagacggcacagaagcactctctacttagcaagtctggcatcttttcctggtcaaggctatgacctctccaggttatttagttgctaactaaaaacgtgctccagggatgtgatta

SEQ ID NO: 460172 - DNA, 560 bp, Sorghum bicolor
  unsure (1)..(560): unsure at all n locations
cgtccgtgcttcccgtagcagatcataatgctcagcatcagcaaccacaatcagtgcagctacacagccagggcccctgtccacctcaaccaagcaagcccagtcactgcagtgttgcatcctatgctgttcaaggaaatggccagacctacagctccacatacaagaacccttctaactgccctgcaactgttgtagctcttctgcctcagcctccagctactgcttctatggcgtatcatcccttgggaccacaggtcgtgcacaaccatccatttggaaatttggttgaaacagctagtgttgtagggtatccacgggatcaagttgagatactcccagtggttactgcagcccaacctgtaatggttgataagcttaatgctggcagcaatgtaacatcccctcgtgagtggtcagcatagtggacaatgtgcgatggtagacggtacatttcactgcttccacaacttactagtatacatataatgcagttggaagcacatcangtctattttatctggctccttttttcccatcagccagcagattagaacaga

SEQ ID NO: 460173 - DNA, 239 bp, Sorghum bicolor
  unsure (1)..(239): unsure at all n locations
cgtccgagcgattctagagctaatacgtgcaacaaaccccgacttacgggaggggcagcattattagataaaaggctgacgcgggctctgctcgctgatccgatgattcatgataacttgacggatcgcacggccctcgtgccggcgacacatcattcaaatttctgccctatcaactntcgatggtaggataggggcctaccatggtggtgaccggtgtccagctactggtggtatga

SEQ ID NO: 460174 - DNA, 536 bp, Sorghum bicolor
cgtccgctcatgactccactgtaaaaatctcttcaccagcaaaaaggcctgcacatgatgaagtgttaatgaaaccgcgggtcgcacctttcaatgaggctgattctctgggcacaatctatcctactagaaaggatacccttggaggatttagtgtacatgttccttacgtttcaaggatgagaagggggcgccctaggaaggacttcatttcatttgcggataaggaaccctcggttgaacctaaagggattcagacagcagttgaggtgatattggagaaagatggtgacaagggaaaccacctgaggaaagcacctgaagttccagtaaaggtaagttctgagaaagggcatatagaagcagttgattgtgaaggggttcggaacctacaagcaaagctttacagtgctgttgccaaacctaaaattaaccggggtttaacgcggaagcatcatcgagcattgacattgtgtgaggtcgtgaaactggttgatggtgtggctcggtttggagctgggaagtggtctgagatc

SEQ ID NO: 460175 - DNA, 123 bp, Sorghum bicolor
  unsure (1)..(123): unsure at all n locations
aatcangcagatgagattatcagttggttgtcttgaagaaagaaaagccaatattcccatacagtctgcctccagacattgaaaatgttctttctggatgctttgagtatgacttcagaaaac

SEQ ID NO: 460176 - DNA, 207 bp, Sorghum bicolor
cgtccgcagaactacaagacatgcagggcaggttactgaacatgagcttgcagtatgcggaagtagagcaccaacgggaggaattagtgatggagcttaaaaacgtaaatgcaaagacgaaggggggacggtggttctagcaattagtgacagagctaaaactgggtgccaagcatgagccacagcaacaaggagggttgattatat

SEQ ID NO: 460177 - DNA, 139 bp, Sorghum bicolor
cgtccgcgctgctagggcagacggacgacagtcagtgtgacgacgactaagacgaggaggatggcagcatcctcgcgcgcaagaaaggtgtgggcgactacgacgaggactacggcgaggggctgtaggaggtgattgt

SEQ ID NO: 460178 - DNA, 169 bp, Sorghum bicolor
cgtccgctcacgcgtccgagcaatcaccagagcaagaaccactccgacgaatcatacggcgaggctaagtccaaacttacttgatgactcactcgaaggagagcgcgaagcagaccaccaggaagtacaccgccaggaaggagctgaggacgcaggtggcgaccaaggc

SEQ ID NO: 460179 - DNA, 65 bp, Sorghum bicolor
  unsure (1)..(65): unsure at all n locations
cgtnccgaataaaaataaaaatatttataaaactgnntttaggtttaatgcgtgctaaatncggg

SEQ ID NO: 460180 - DNA, 320 bp, Sorghum bicolor
cgtccgcccacgcgtccgggaccccgctccccggcggcctccgccgccgccgcttctggcctctcccgcacgcaggcgccggcacccctcttcttctctactctcggtgacgactcttcttgtgttcctcacaagtcacaagcttaggcggtacccccgatttgatgcgaaggcttgcgtttctcctagatgcggcgggacaggacagggggaggacggatgccacgcacgggctggcgcagggacgagcgactcgggagagaggtgcaggaccccgcggcttggacagagctcgtggatatatacacaaaagatgtgtg

SEQ ID NO: 460181 - DNA, 415 bp, Sorghum bicolor
  unsure (1)..(415): unsure at all n locations
cggtcgacccacgcgtccgcaagatttgcagttttgctggcgccgtgaaagccagcagcgaggtacctgagatcgcaagcgttccgagcacagaatgagcttggtggcgttccttttgttcaagatttctggaaggatcagcccttcagcttaggacaggcttgtcttgggcctatgtagtgtacaatttctgtatctcatataccatactcgtggccagtttgtatatcatatataaaccatacaatctgtatttggaggtacttgccatttagaactctgtggccaaagaaagatgaggtcatttagaatgattcattcttttagcctgtaaacattatacattgaaaacctgagcagtgaattaaggatgcccaagnttgtaaaataaaaatatttattattattataatta

SEQ ID NO: 460182 - DNA, 122 bp, Sorghum bicolor
cgtccgtgctcgctgacgctatgcataatgcacgtccgcttgagatgctatcatgcattttcaggcatgtttagtcaagaatcaagaccagctaggaacctagctatggacttgcaagaaaa

SEQ ID NO: 460183 - DNA, 59 bp, Sorghum bicolor
  unsure (1)..(59): unsure at all n locations
accccgcgtccgcataaatttctgcaaatgttacaaattagtaataatttctgctnaac

SEQ ID NO: 460184 - DNA, 239 bp, Sorghum bicolor
cgtccgcccacgcttgcggcattctcttgtacatgactcatgcttcttatcagcgcccatctctacacttctctaaataacaatgtggggcggacacaatacactagagcggcggacaccacggagagcttgaggatcatcttcggctacctacttctattgcttctggccttagtagccaccgccgaggcccgcgtagtccgcaagctgatcggccagaacgcatgccatgagacatg

SEQ ID NO: 460185 - DNA, 234 bp, Sorghum bicolor
acacgggaatctcatctcatctactagtacatgcatcgataatcagccatctgcatgctatatatctagctcgtaatttctgttactgcttagcatcatcatccgtgatccatatatcatctaggactagtatatgcgtgtgtcagtcacctcgtctgtacatctagtctgtctgatacatgcatgtaaggtatttgtaaccaccagcttcttcaagttttctgcttgctaaaa

SEQ ID NO: 460186 - DNA, 284 bp, Sorghum bicolor
  unsure (1)..(284): unsure at all n locations
gtaccgtccgnatcccggtcgacccacgcgtccgcggacgcgtgggtataaaaaaaaataaaaaaaaaaaaaaaaaaaaaactaatatgtttatttttaaaatttaataataaaggtgttgggtgtaaatatttataatataaagggcggccaaaatgtggggttccatcttaagtacccttgctttcttcgtcatactttttattttggggtctcttattttaaattaacaagattaatttttttcactctcgtgttaaaaaattctttttggtaaaccaatt

SEQ ID NO: 460187 - DNA, 247 bp, Sorghum bicolor
cgtccgggccgagcagctcgacgcggctggcctgctgcccgacgaagaggacctcttctacgacgaccagctcgagcaggcccccgccgccgtcgacccagcgcccgccgccgccgtcctcaagacagatgaggtgctcaaggcgctgaacctgacctccccgaagggcggcgacgccccgcgtgggttccgggagaagcccaggcactccgagaagccgaccaagtacgccggcagccccaagagc

SEQ ID NO: 460188 - DNA, 316 bp, Sorghum bicolor
  unsure (1)..(316): unsure at all n locations
taccgtcctgattcccggtcgaccacgcgtccgcgtgtccctctctgcttctatgttcttcttcgtccgcatacacactatgtctcttggtgttcctttgggaaggtactgctgagcagagagggcttctcatcctgtgttcatccaaagtgcgtgggagatcgtctgacgtacatgggagacagacaggaacgatggctnggcatgggttgaggactagggagtgctatgctggtgggtgtggcaccaagggatgatgaantcaagatcacccaatgaacttctgtcgactataaccgagactacatgacaattc

SEQ ID NO: 460189 - DNA, 130 bp, Sorghum bicolor
  unsure (1)..(130): unsure at all n locations
cgtccgcatggcgcatgggcgcgtcacgctactacagcactgaacgacacggactacctcatagcggtggataaggagtcgatactgctgcacacgacgactccaatgctgacggcacaatanaccatgg

SEQ ID NO: 460190 - DNA, 255 bp, Sorghum bicolor
  unsure (1)..(255): unsure at all n locations
cgtcgcggttttttttgtnttnnttnttncccaacaataatgtagtctgtatttgtagattcattactgacaggcctgttttcacttgtgaatgtgttgagactgatagtttctcgaatgaatttgataacacactttgttgattgcttgtctgattagttgtaggtccatcagtatagatggccaacatcttgagggtcttggcaagactatctaagacatatctgctgtcccctaaggatcatatgtcttatt

SEQ ID NO: 460191 - DNA, 280 bp, Sorghum bicolor
cgtccggaagaaatggtgatgcgagcccagcaagcccctgctggttcataagcttcacaagatagtgataattacatcattctgtggggatgttgcaatgcacgacctgcaatgctgatcctatcttttgaacagtttgctggtgtaggaggtgatagcctcatatatagcttgtgttattctctcattacttcattctgtttgtagaacaatatcatacttattttcagtgtacgagtagtggaataagtggactgtgcatcacatgatttacatgtac

SEQ ID NO: 460192 - DNA, 199 bp, Sorghum bicolor
accgtcccgattcccggtcgaccacgcgtgcgacacacgatccgatcagaagcagtggaaggatccgtttcagacagagatcagagcgactgagatcttgatacctttgatgcgaataatgtggggcttttataaggactgtctgtacatcagcatgagtctaaatagcgaatgtacatacatacctgttcgattagta

SEQ ID NO: 460193 - DNA, 254 bp, Sorghum bicolor
cgtccgatccttggagatacaccatgaagtatttttattaggaccttgctgatgaaacaatggtcggacactgtgtattgattcttttgtgtgtataatatgggctctattagacttctgtaatcagatagttgagaggaattacagcatagtttcattatacgtgcgttgttacgcaatttatttgtttgttgaaaaaaaaaaatatttaaaaatattttaaaaatataatattaaatataaaaaatatttgg

SEQ ID NO: 460194 - DNA, 206 bp, Sorghum bicolor
tttttaattttgtatgcaggagcttcattcgttgaaataaacatatatatggatgtgaatcatatatatgtattataatactcgtgctggagcttcaaaatgaaaatgggatcttattggggcagtgtcaactgatgaacatgcatggatgcatgatatgtggtcatcacttgaagatgctgcttagggagcaatcgtcgtgaaca

SEQ ID NO: 460195 - DNA, 148 bp, Sorghum bicolor
cgtcgattcgtcaccacgcgtcggtcggggctgtcgtgcatgcatgcggactcgcggcgtcacatggcctatcgactggcgaggcggggggggtatttacgcgggaaccctctgtgatactcccgacctgcggagctacagtgaatga

SEQ ID NO: 460196 - DNA, 61 bp, Sorghum bicolor
ttcccagtgcgtatagcaaaggccggccgaccccttccacagtaccagctgatggaatgga

SEQ ID NO: 460197 - DNA, 175 bp, Sorghum bicolor
ccgagcgtaccgagcgtgcaaaacacgagcgatcatttttgaaaagacaatgctgattacacaatggtgggacactgtgtattgattctttagagtgggtaatgtgggctacatgcgactgctgtaatcagatagattagaggaattacagcattgctacaatatacgtgcgttg

SEQ ID NO: 460198 - DNA, 86 bp, Sorghum bicolor
  unsure (1)..(86): unsure at all n locations
acgcgtccgccgccctttttttttttttttttttttttttttttttttttgttttatatntttattngntngggccaagaacgcga

SEQ ID NO: 460199 - DNA, 51 bp, Sorghum bicolor
caaaggccgaccgatcgccttcacagtgccagctgaggaaggaccccctga

SEQ ID NO: 460200 - DNA, 226 bp, Sorghum bicolor
cgtccgcaggtgcgcaagtgcatggacaaccagcagaacatcgtgacggcgcagggccgcaaggagaggaggtcggcgggcggcaccgtcatccacactgcaccatcagccgacccggagttcggaagagcgcgcgcggcagctagactctggcggcgggagggcctccccttaatcacgatggctataccagggtgggtgactgctacttctccaggacggcgcc

SEQ ID NO: 460201 - DNA, 214 bp, Sorghum bicolor
cggaatgaccgactcgaccgacgcgtccgatcaagctccaactggcgaactgcagcgtggggcggatgcagtaccccatcgacctatatcacgagcttgccaagctggggcaatgcctgagctacctgaaaaccttctaccgacccgctgcagccaccatcggtaccagcggacacgacatcatggtgagtttcaaggacaacgcctagagcct

SEQ ID NO: 460202 - DNA, 154 bp, Sorghum bicolor
cgtccgcgcggcgcgctggccgagttcctcaagccggacatgctgaggctgtacgtgggcaagatcgacggcgaggtgcggcgcgccctcgacgagcgctgtgccggtcgcaccacctttacgggatgccttcatgaagcggttacgactaata

SEQ ID NO: 460203 - DNA, 84 bp, Sorghum bicolor
ttcacagtgcagctgaggaagaccgccgacggcatagccggtggggacccacggccgtcctgcggcacgcgtcttgtttctctt

SEQ ID NO: 460204 - DNA, 130 bp, Sorghum bicolor
tgatgggatggaccgcctggcggcataaggcgggggggggtcccagggccgtcactgcggcctacccgtcttcgttctccttcttttgacgtcgcggttcccgaagcttaacggggtccttaggtcgatt

SEQ ID NO: 460205 - DNA, 288 bp, Sorghum bicolor
cgtccggacaaggtcatcgtaatcgactataagccaacttcggtcaactagtggtggaccctgaaccagcaggcggagcttttttgcagttctcattatctatatatctataataatcctctgtactgttcgtgggaggattccatttgactctacactttctgctgaataaataaacttgttagctttgttccttgttaagaatgaactttgagttttctgtaactgcacttgttgtaacttggcatgtttcttattgatatcagaattacgttcctaaagacaaaa

SEQ ID NO: 460206 - DNA, 85 bp, Sorghum bicolor
cgtccgcgcacggactcagcagcggcatgatcttagccgggaagcaagtctaggatagccgcaccctcgcggattataacatcca

SEQ ID NO: 460207 - DNA, 344 bp, Sorghum bicolor
cgtccgctacttgcatgactctgtctagtgcaacagcatatccagctaatgccattgtatctcaatcttgttccattttttattcattaacatgattatctggattcaacataatcttatatattgagcccaaacaaagtatctcagtaaacagtgtacagataacatcgtttagaacgaggagtgcatggagtagcaaaacaactagagccttacaaggcactaaaaatactgtgggctattgaaaataatagcgcatctgtcacctaatattcttaagtggggtggaaatttatcatattgcatgggtattgatgatgatgatgaacaatggtctgaaagga

SEQ ID NO: 460208 - DNA, 206 bp, Sorghum bicolor
gacccacgcgtccggttcaattgatgctgtgcatgcaggtgctgcaattcattgttggccatccccagcttgtgctgtcgcagatatcagcagagtccttcgcccaggggagttttgtgcttcacattcgtatcacatgttattcaccaggtttccagtttgagacgacgaccgacattaccaatactggcacatcctctattgag

SEQ ID NO: 460209 - DNA, 330 bp, Sorghum bicolor
cgtccggatatgtagacgggagatcaggggtatatgcgtggttgatcactaaggcaggaatgtaacggatccaatccagctatgttaggtatatactgcttgaagcattcatgcttttactcaataagaatgataaaggtcgacatgtgtagaataacttgttgacctcagtggctgaatgcctacagtcctacagatccggactaaagtgaattgcacttaagttctatgtcaaataactacctacttgttttttgccacactattcatgatcaattacatgcttgatttacactaggtcataatcagtatttggtgctgactgatctg

SEQ ID NO: 460210 - DNA, 174 bp, Sorghum bicolor
cgtccgctcagtctcaggcgagcgagcaaccgcggctcacgtccacaggcccagcaacagtaggccccgccctctccagatccacaggcagccgccgccgccgcggataaaagcggcgcgcgcgcgcgcgcccgtgagggaagagagttggaacgcgcgtcagcgcgcgagcgg

SEQ ID NO: 460211 - DNA, 117 bp, Sorghum bicolor
cgtccgaccacactacggttacctcgccagggcgtccatccgcaacgagtccgagccatggcgatggcttacaagatggcgacggagggtatggacgtgaacgaggattgccagcgc

SEQ ID NO: 460212 - DNA, 227 bp, Sorghum bicolor
cgtccgcgccgctggcaggtttataggccttacggatgtacacgccaagccagacgacagcacccatggtttgcacggacagaagcaggctcagcatgagtgatgggagcctacaccagaccaccatggtgtaatggctgttgaaacaatcatcgacgaacgcgagctgcatctacatgatcctgaaggcatcactggtacccaccttcttaccaacaatgctcttg

SEQ ID NO: 460213 - DNA, 188 bp, Sorghum bicolor
  unsure (1)..(188): unsure at all n locations
gtaccgtcctngatcccggtcgacccacgcgtccgactgtgccagtccatggttcagtgtggacacacatgcatgtctttgtacgagaactagtcggcttgtctaattaagcacatggcaaacatcgatgccgatatcacatctagcacagctcctaactaccaccatcaatcatggcgtattggggc

SEQ ID NO: 460214 - DNA, 291 bp, Sorghum bicolor
cgtccggcgatggagaatagctatgtacaggtacatcacctcgtcaccttcatggccatccacacccacaaaccatttcttggccctgcaaaagagactcttccactagcgctcctagtaggcttctagctaccaccaggagtcgtcccggattgagccagccagcggcgatgatggcggagacggacgccgacaagctccggttcatcgaggaggtgacggccgacgtggccgccgtgcaggagcgcgtgctggcggagatcctctgccgcaacgccgacgccgagtacc

SEQ ID NO: 460215 - DNA, 253 bp, Sorghum bicolor
cgtccgcgaagacgttatctcactaatcgagaggaggagaagccactcgacgtgcatgggttcctcagtactcgcttaaggacgctcataactagacgcactgggtgtcagatcgagcatcaaagaacagtcacattatatatgcctgaaaataaattacatccacaaaggtgaacatatagagcatgaagaacaggatgggagtcctgcagaacaccaggagtgatgacaggcacgacaaggtatatttctg

SEQ ID NO: 460216 - DNA, 381 bp, Sorghum bicolor
  unsure (1)..(381): unsure at all n locations
cgtccggctctctgcccaaatgtgaccacacgtgggatccagctagccacagcacagttgccatgtctccaactcatggactgtggaatgagcctatgcactaacatgaagaatgaaaaagagggtccatattttggtgaactcaatggatgtattagaattataccaaaactatccaccttaaagaggcaacctattcaccaaaagcttattataaagcatgggaatttgtagaaactcagtctgtggggctgttctgcaatagatgctctatatgtaaatngggcacagttaaatgatcataatttgaactgttgtacataactacatgcagaacgtttgcttcttcagtgtccaaaattgaagaatgttcatgcattt

SEQ ID NO: 460217 - DNA, 264 bp, Sorghum bicolor
cgtccgggctcgctcgctatacctcgacgctcagctctctgggccactcattgccggttggcattcgtacgtctcctccggccggtcagtgatgcgcacgactaggtctcaccactcgtctgagagctctctctctctctcaagatacaaaactggccaagaacgagagatgcaggataagacagagaggcgcgagagagaggggatcggctggccggtcagccggagggaacatagaggggagcgtgcgcaggaagctgatga

SEQ ID NO: 460218 - DNA, 103 bp, Sorghum bicolor
cgtccgctcagctgacgataatgccgattagattacatctgagcctgaacttaccatgactcactaccatcctagcttagtgcctagtggagtgctgctggat

SEQ ID NO: 460219 - DNA, 266 bp, Sorghum bicolor
cgcgtccgtccgtcctatgctccgccgctgacacgttggcccgactcaaccttccgatggtcgacgccgtctccatcaccggcatctccggcgttgtgcttacggacgccttactatcccaccggtcgccgactccgcatgtcctagccttggcgtgctcatgccgtcggctctccctgtgcgctttccatggccggaccacccacataatcacccgcgctgacgccagtgccgaagccggagaaccggagactgaggagcctgtc

SEQ ID NO: 460220 - DNA, 121 bp, Sorghum bicolor
cgtccgaacgaacgtgcgagagcatcgcagagggaagaaggcggcccacttggctggctcgatcgccgctgtggccacgcagatgaatcatatcagcaccgtggggtccaccagcgcagac

SEQ ID NO: 460221 - DNA, 129 bp, Sorghum bicolor
tttgaaactgaactctgctgcgaggtgaacctacctttatactgctagatggaggtaggttgcaagctcctatacccctcccctaaataggtgccagtgtagtcatgcccctcctagactttattagaa

SEQ ID NO: 460222 - DNA, 330 bp, Sorghum bicolor
cgtccgactatactaacatactacgcagctgtatatcagacatgcgttggcggcactgccttaactacagaagcattccatgctgtcgctatggtggtatgacctcatccatacgatcagctagacataaagtacatgtcatagagtctggctcatgccatgagcaatcaactattatcagctcctctatgcctgcaggaatctggatgactcgagtagacaagcgtgacttccaaactccctcaggacaattcatgtcatagacagaccaggctgcgcgtaactgcaacagagactggtataccgcttgtctctcatgcactaacacat

SEQ ID NO: 460223 - DNA, 373 bp, Sorghum bicolor
caccataccactttgatttttcgtattacagtgacaaagtcatgtaaatcattgtcaatacaaatatacacttgtaatcaatcaactattttctactgcaattctaatggcagacatataataaccaaaacctttttctgcttagagcacatcaaaatagaaattggatcaaacaaatttaacccacaaactatacatgtatatgcacatgagcaccaaacatgacttcaatcaccacaaaacacactaaatcacaacaacattgtacctagatcggctgtagagcggcacagatcaagtgagaggactgttgtgatcagccttgcaagcatgtttaggatgacatgttgacagcacatggtcttcttgaacc

SEQ ID NO: 460224 - DNA, 124 bp, Sorghum bicolor
cggtcgacccacgcgtccggaaccacgaggagatcggatgaggaagcatccatgcccaccgcatggctgagcggcaacatcaccgcaggactggcagccagcgcttctgctccgcacgaagccg

SEQ ID NO: 460225 - DNA, 505 bp, Sorghum bicolor
  unsure (1)..(505): unsure at all n locations
cgtccgccagttggtgctttttcacgacacgccttcgtttaccctgcaacttgaacagctggaagcttgccctttcatactgtgatacttagataagtgtgtagcgaccctttattactagagtttcagggataacaccctggtccatttgcattgcatcaggattaaaagtcacaatcagttgcagcccaaacttgccattttggttggtcaaaaccacctgctcatggattttgtccaaactactcacagggttgtcgttcacatgtgtaacctcttcgacatactagattttctatagaactaggtagaaaggttatctagcaagatgatagtatcgttcagaacttgatgctntccactctactacccttgctattagtttggatacgaccaatctacactataaaaggccttcacatatttattcccttttgctgcatgcacaaattggttgcctgggtgcaaatgaatttgctacagatttattcccttttcaaaaata

SEQ ID NO: 460226 - DNA, 301 bp, Sorghum bicolor
  unsure (1)..(301): unsure at all n locations
tcgaccacgcgtccggtatctgactgggataccgatggagccatctactttcagtactcccgtgtttgtcctgactttgctcagtacgcctcantgcacatcctggtatcaagcacacactgttaatgtccgtgcggtctctgtggccatggtcgctgctccataagactgctgcgcccctagcgactccagctgtgttccggtcctgcgcactcgcgatacgtgcagctgctcgttgtatacccggtgccacccagagcatctgcatgcgcactgcagctctatgggatgcagagagagc

SEQ ID NO: 460227 - DNA, 161 bp, Sorghum bicolor
  unsure (1)..(161): unsure at all n locations
cgtccgaatttttggacctcgtgatggtcggacggatggtgaacaatgttatcacgacaagcgttaagtaatactacacattattctctccggngttaatggaaccccaccagaacacctggggtagcggtgttgaaaagcatggctaagcaagctgactc

SEQ ID NO: 460228 - DNA, 251 bp, Sorghum bicolor
cccggtcgaccacgcgtccgatctgctctgcccacagatgtcacccctgacacagcacctcatcatcatcctgccctggatccatcggcaacaccatcccctccttctggcccgacgtggtgcgacatggatgcgcacgaggagaagactgctactgctgtcaccacagaggagcctgcaccggctgcggagcctaagcctaagccagctacggaggcgcacatggcaggtccgtcggcgttggcaacccc

SEQ ID NO: 460229 - DNA, 166 bp, Sorghum bicolor
tcacccctaggagcgacctgcgacttctccgtttcacttgcgccaggctgcctgcggcgtgaccggggcctcaaccgcgtctctcgctggggagcccaacaggccacgctccgaaggcctagcccaacgtacccttgcgactcggcggtggactgtggcgtggagc

SEQ ID NO: 460230 - DNA, 270 bp, Sorghum bicolor
cgtccgctctcgccacaaagcgccggacccaccgagccgccccagccttctccgtccgcacgtgcgttcagagcaccccttctaggcagaccaagggagcgtaggcggacctgtcgtctgccacagtcctctactcccacttctcgccgccggcgacaggggcctcgccctggcggcggcggctgcaccgggggcgggccttcaaccgtcgtctactcgtggggagccaacaaggcacgctccgaaggcttcccatcgacccttcgctcg

SEQ ID NO: 460231 - DNA, 381 bp, Sorghum bicolor
tcgacccacgcgtccgattccatgcagcatttctgaagctattgatgggattcctagttcaagtcggaaggcagcatggataccgtttaccttagagggactggcagttttagacaaaacaactgctctttctaccacagggatcccatctgtgcctagaaattctggtgaagctaagtttgagacaattgataataagcctgccactgatgaactggatagcctgatcaggttaaagcatgctgaagcgtatatgtaccacgaacgtgcaaatgatgctcggaatgaggttgacaatctgagacatattgttgtggtaaaaaaatgcacgaattgtggtagattatgccacccaaattgttgatcttgacatatatgaat

SEQ ID NO: 460232 - DNA, 259 bp, Sorghum bicolor
  unsure (1)..(259): unsure at all n locations
cgtccgcggacgcgtggnggactacactctggcacagtacaagcctgagaccttcgaggcccttgcttactatggtacaatagagaagcttgtgaaggatctgcgctaccctgaagagttgctgacttgggagtttgattggaaatatatggtcagaggactagttcttgataagaagagaggaaatatcttgaagaggatcgaccaagttgtaaagtgataccatggttaagacgcaagagaaagtgtgtatgagaca

SEQ ID NO: 460233 - DNA, 254 bp, Sorghum bicolor
tcgacccacgcgtccgcagacgcgtgcgggactacactctggcacagtacaagcttgagaccttcgaagacctagcttactatggtacaatacagaagcttgtgaaggatctgggctaccctgaagagttgctgactgggcagtctgattggacatatatgatcagaggactactgcttgcaaagaacagaggaaatatcttgaagacggatcgacacaagtatgtgaaagtggcataccatgatggtaaggaa

SEQ ID NO: 460234 - DNA, 208 bp, Sorghum bicolor
cgtccgcgctcgccctcattacactgggagcatcgatctatctatcagctcgctcattggccatcttcgatcgtcttccatggagaggctcattgccggtctacttggcttcctatagattgcgtcagtacgaagctcatgcacctcgtgctccggatcaactactggcagccgctctcccgcactccagccgacctccttcaactct

SEQ ID NO: 460235 - DNA, 196 bp, Sorghum bicolor
cgtccgcggacgcgtgggcggacgcgtgggcgcttaatcagcagcagcagcagccagcagggaaggatgcaggcggtgggcatccggcgtggtctgaccatcgacccggcgaggaggaggagcccgggcgggcgcggggcggtgtccagaagccgtggtgatcttcgccgccggtgtgatgggcacggaaacatgt

SEQ ID NO: 460236 - DNA, 373 bp, Sorghum bicolor
cgtcggaaatacaatatgtccacaaaaagcaatctggtggatctgggcagttgcagacattatggcgtttgaacttggagctggaagggtatgagtcaagagtgaaatcaaggaggcaggccaaagaatatgtccagatgtgaaggatgaagaaagcttaccaatgggtctcccggtccagtgggacttcgctggctggtgatgtatatagatgcattaagtgtctacatccaaatgagccgagggccttcgtgggaatgggaaagctggtccaggctctcgagcctataatggagttgagtgatactcctgaagagcacttggtgatgtattgggatttgactttatggtaggacagttacacttttgtata

SEQ ID NO: 460237 - DNA, 84 bp, Sorghum bicolor
tttttgacgacacacacaaaaactgtgtcggtaataagatgaatatcacacgcagcagcactcttcttacattacattacatta

SEQ ID NO: 460238 - DNA, 331 bp, Sorghum bicolor
ccggattcccgggggaggatagggtcgacggcgagcgtggcatggttatcgtacagtccgacggcgacggctgcctgtctgactcggactcggacggctccgactggtcaatcggctggctcgagccgctcgcgccggagttgcagagcgacgcggactccgagggcagcttcgccgtcctcgtgccgtgctatcgacacagccgcctaccggctgccgtctgatggaggtcctgtctgggggcgccacgcgattaatacaaatttggacaaggtgttcctcgacgagttcgtctctactgctcatgttcagatgtcattaacgcaatcta

SEQ ID NO: 460239 - DNA, 74 bp, Sorghum bicolor
cgtccggcgggatgaatacagccgtggtgctcagtttacttctgtctgctcgcatcacgtacagttggtggaag

SEQ ID NO: 460240 - DNA, 310 bp, Sorghum bicolor
cgtccggacgaatggcgatagtatctgtgcttggaaggaagaagtcaacggccaaagaaacagttgtcccggaccctgactataggttaccaattgctatacttgggattgctagtgcttttgcatatgcagacaatcttctagctgctgcacctgtaggactgctggggcttcttcttttgttccagactacaagagtgaggttcgtctttgataatgaggccctggaggtgaaagttggagaccagctgcaggagtcaggtgaaaatgtgtttgtcggcggcaagaaccgttggaagtactcaacggt

SEQ ID NO: 460241 - DNA, 358 bp, Sorghum bicolor
cgtcggcatcaaacaacaagcagaccatccaccagtattgggttcataaataaaaatcaatcagtaaatgctgcaacttttgccatgaattcggagtgacaaaagatgggtggtgagcatacaatatcagcaggcacaactgcaatgcctgctcaggcaaatataccaaacagaggtcttgatgctcctcggaacatgttctcagcatttccagctgctgttatggagaaccagagcattccatcatctccagtggctcaatcgtggatctcatttggtgctactaccgagaacaaaccaaccattgtcagtccaacttttcttgcaattattgtggctggaaaatgccatttgctaa

SEQ ID NO: 460242 - DNA, 172 bp, Sorghum bicolor
cccttcatctccaccgacaacattatactgacctacaatcatctctatatcaatatccgccacctcaaagacgattcccatcttacaaacctaaatttgctctcattcaaccagaattattactaatatcatgataaatttaaactcaacaaacatactccctaccatcgtc

SEQ ID NO: 460243 - DNA, 405 bp, Sorghum bicolor
cgtccgaggtcttccactgcgaccagatcctactaacgcgtcttcaaaagaaccagggttggaacatgagaatgcggatacaccactgcacaatgtccaaggatcctgtcagcctagccttcagatatggcctgatcacagaacattgaatgaacagcatgttccttttctagctccagcacagtcatacggtggagggatggttccacctcaaggaatgtatccatctcctgattggagtggatatcatcaggtacctttgaatccatattaccctcctggtgtccctattccgcattttccagctgcccatatgaatcacccgatgtacaaggctgcagatgtaccaggaaatcaaccaccaccttctgatgagtatcctgagagacctggccaacttgaatg

SEQ ID NO: 460244 - DNA, 312 bp, Sorghum bicolor
  unsure (1)..(312): unsure at all n locations
catcacatactgtactntacgttcaattctgttgcccctgaagtccgtgagcataattngttgtggtttcctatttccctttcttgtaccagatcccggccagagtccagcgcgccacctggcaccaaggcttgccgtgagaagctccggcgagacaggctcaacgaaagggtgtgttcagagttcagactctcagtgaccaataccaatctccccactgcttcagactagacatgcatgttcagcacttgtaacaccgagtatgatcatctttgatcatccgctcatgatgcaccattccaggttcaaacg

SEQ ID NO: 460245 - DNA, 345 bp, Sorghum bicolor
gatccacgtgctcgctctccttcctgttgcttatgcttgcttgcggttgcaggcagccgctgtgccgcgaccgctagcgacctgtgtagtaaggggagggagggtcggagggagcgaaagaagagaatagaagagaatgtttggtggttgtttggtagaggagaatagttggttggctcatggtcatgggggcgattatcgagcgcacggtggtggcggtgtgccccgtggtcggcttcctcgtcgtcctctacggagtgctgtgattttacaaggaggtcacacgcgtcaagggttcagatgttcaaataagcataacttctggtgaatgcatatacccaaaaa

SEQ ID NO: 460246 - DNA, 435 bp, Sorghum bicolor
cgtccggccgtgctggacccgtcgactactctccgcccgcgtaccactccgccgctgccggatacgccgccaccgccgcgagtaggcgcctgaggatgattgctgcctccaacaggtccgccttcaatgcctcctccgcctctcattttctcccctcgctcggttacatctacgaggagtacatcaccgacgctgccaagtccttctcgcgcgcctcctccgttctttttagtgttataatgctgcttcttgtatcgtttctttgcttcccttctctcatttatttatctctactataactttcttttatttctattattatctttctttaatcatattttttctctttattaaatttttctatttaggctcttttttttcttctttttatttttatctttaatttttttatttttttgctttattttctatatt

SEQ ID NO: 460247 - DNA, 198 bp, Sorghum bicolor
gaggcggccgacaggagccgagccaagagctcaggcttcgccgcgaaaccccagacctcgcgcgggtccttccgcgggccggcgtagtcctcgctctccgatccaagatgtataaactggggagaggaaaccgctacaaggtgcagcattttatgactcataaccgtttccagtgagaaggttgtccttctcgcactt

SEQ ID NO: 460248 - DNA, 278 bp, Sorghum bicolor
cgtccgcaaaatgctgtggccgagcggatgagaggaagatggctgccaccagcctcagctcctgctcctccctgcccagggctactgcaaaactagcaggactaccaagatcatcgtcgtactacacccagctgaccttttgctcgaggcatcccttcgagaaggcggcggcagctgcagccttccagaagctcccacccgagctcctccggctgagctacccggcgaggaatagcaagcatgcaagaaccagctgccggcgggccacggacaacgac

SEQ ID NO: 460249 - DNA, 441 bp, Sorghum bicolor
cgtccgtgaccctttccccagatgatcgacagtgaacatactgagcgctataatttctcatttgagaaaaccaagccagaattctgatccttcatttcctcttttcaaaatttatgtctctttgttttttgttctcttaactgagttttgcatacccaagaagatatgatgaccctttccccagatgatcgacagtgaacatactgagcgctataatttctcatttgagaaaaccaagccagaattctgatccttcatttatgtagaaaaaatgattctgaattcatgtagtgatctttttgttgcgtcttatcaaaattatgccactttttgagcttttttggtctcttaacttgtgttgccacttcagaggatatgatgaccctttccccagatgatcgacaatgaacatactgagcgctacaatttcttatttgagag

SEQ ID NO: 460250 - DNA, 283 bp, Sorghum bicolor
  unsure (1)..(283): unsure at all n locations
cgtccggatcccgtgcgtgtgcgagtgtgagtgagatcgacaccactagctaggtcgagaccatggctacagcttacgctcccatggcgagccaggtgatgaagagcagcctgcagctgcactccaagccgaggggcttgtccggcgctgccctcaccaccanaggcgtcccggtcacgcaaggcatcagccggagggactaccaggggcagcgacacgaccgcatggagcgaacccgactaccgtggcggccttcactgcggccgacgcgagcctgtgggta

SEQ ID NO: 460251 - DNA, 213 bp, Sorghum bicolor
cgtccggtgtctacaccaacagcgtatctatctacatagactactgactctttgatgacgatgtggtgagagctaaatgatcgaagtggcgaaatcataaaaatgcacacgtcatcttgcgaacagatatgattaaaccaaagcatgtattgtagttgataacacatcacatacatcttcgatacttctaatcaaatgctggatagatcaaat

SEQ ID NO: 460252 - DNA, 109 bp, Sorghum bicolor
  unsure (1)..(109): unsure at all n locations
cgtccgaaagataaaaaaaaaaaaaaaannnnaaaaaaataaaattaaaaaaaataacaacaacttaaaaacaaaaaaaaaactttttccctttttgtgagatcccggt

SEQ ID NO: 460253 - DNA, 369 bp, Sorghum bicolor
  unsure (1)..(369): unsure at all n locations
cgtccgctcaactntaatcacaagttgtttgtattatatttagattctcatgctctactagttggcctctcaaaaatatatgcattgaactagttaactagtctcaaagcttggtgataaatagatattcctttttagaatctttgctagcaaaactgacttatcttatattcatttgattttcaggtagcaaaactgcaaaactgacttttctttgctagcaaaactgatttgctagcagacgcttgatgaggctatgcgtgaattgcggcaagaggatcaaggtgctcatggtggctattttcattagtcatgatagattntgtgtgcgagcaaatcatatgagttgttgctgtataagccaacata

SEQ ID NO: 460254 - DNA, 336 bp, Sorghum bicolor
cgtgcggcaatggccatgagggctcttccgctgaccccttccaagacctcctcgtttggagctcaccaaatcaggccgagcagtggcaacctgagatcagttagagcttatgcaaagggaaatgaggaggagggcaacaagcagtccctattcggaagcatcaccgaggcgctggacttctcgcaagtccggtcggagaaggatgccgagctgctgtatgaggccagggagtccaccaaaggtggagggaggatgacgagggaacagtacggagcactgaggcggaagattggtggcacctaccaggatttcttcaagtcatatgttgatgtcgat

SEQ ID NO: 460255 - DNA, 451 bp, Sorghum bicolor
cgtccgtttccttttatttttcattacttattttctattctatattattttactctactcaattattttatttttcatgttcatatttatttcttatttttctatatatttattatttgttattcatgttttatgtgcttttttcttagctattcttctcatttttatattattttttttactataagttatttttagtttagtttttttattttctataatctatgaaatgctatgttcatataatatagatgtgatattctatgatattttttatgatgttcacatgatatataatgtcaggttctgtgatattttttgtgatgttcatgtagtatatatatatgtaatattctatgatatttttttgtgatattcacgtgttataaatgagatgttctaggatatttttatgtccacggagtatagatgtgatattctatatgtattt

SEQ ID NO: 460256 - DNA, 491 bp, Sorghum bicolor
  unsure (1)..(491): unsure at all n locations
cgtccgctcaaccccacccaccccacctccacaagaacaccacgccacacatcccatccagctccacggtgaggtttgagcgatccgagcaaaaatcatcagcaacgcagcgcaggtttgttctctgaactctctgattcttcttttagcagcagggacgcacagcacanagaaaggtccggttcaagaggctctcttcttttgggtttattagaatcctcaaaagaagcgtgttcttgggttaggatttttttctcaacttcatcacacctctcctagctagggggaacagagatccagagaaccttttttctcttctggattcttgccgacttttgtttggccttcgatcgaaagggttgttttgcaatacccttgtcagctcaccacccctttttctttgcataaacacccacctcgtttctctacttttattgaggaacaggtctgatttccaaactttttcctattttgattttgcataacaaaaa

SEQ ID NO: 460257 - DNA, 338 bp, Sorghum bicolor
cgtccgcctacgcgtccggcttgctctcatgcagtctgggatcaagtctgagtgcgcctgtaatgctgcacctcactgctgatctcatctatctgggcaacctactaggggctgctattcatgctcagtcaccacaaacctcaccacacacctgatcgctcttgacatcactgatcacaacagtggcctgatggcatctcgtgcaacataaagggcaaatgacaggccagacgtcagtgataactgttggaacaatatttagtgcattgtagaacgactaataaaactaatcatccatcacatctaccattgcaatgaataatttggtgaaagctaag

SEQ ID NO: 460258 - DNA, 215 bp, Sorghum bicolor
cgagatgacaggttagttgcatgttgagctgatctaactctaacatatgatgggcctgtgctctaacccaattcagcaaaccttccaactgaattcctaaaggctggagtgggaatagcatgctggtgataatcactgaaaaaataagtcaaaggaagatgctactatgaaacaggaagagactctgtgctactgagggggaagctctctttgtt

SEQ ID NO: 460259 - DNA, 199 bp, Sorghum bicolor
tgacaaattttaggcatcctatagtctgcagcaggactaagaaaagtcgtaccgctaaattgggcggcatgcttttttttcttgcaaattgttttcttttgcactctaaaggttgtccttatccatggttacctgaacttcatatagtgagttttgatctgctccccgatgggcagaagctcgggttgagaaacccttg

SEQ ID NO: 460260 - DNA, 348 bp, Sorghum bicolor
cgtccgctgaactggaggatgccattgccaagggcaagaggagggctggccttgtctacaagctgcagagagacaaatagaaggagatgcagatggagaaagatgcaatgacatcaggaaacactcatgctggtagtggagatttgatgaagaatcaagtggtcgtattcaaactgctaaaagatcctagctgttctgtcctagaaccataaggccaaagtgcatgaatttttcatttgccgacaacagaggcgcgaaaaatgagtctgacagccctgtatgtgacttgagaaggaattgaggacaaggcacatatagaaggatgtcattacattgcaattggcatat

SEQ ID NO: 460261 - DNA, 316 bp, Sorghum bicolor
  unsure (1)..(316): unsure at all n locations
cgcgtgcggtcgcgcctgagaggacgcgtgccagggagccgtcggccgccagagcctggcctgcagcccggngggaagcggcgacacgatgttgcgctgcttgtacacgcagcggcggtgggcgcaccgccggnggggcttcgtgactggcggcaccggttggtccaagccgccaccgccgggcctcggccccgccgcggnggtgggcatgaagaagtcggagtggtgggcggtggacggggagatgcacgagatcggggatggcgtgccgcatcgcgagcgcttcgcatcccgnggacaacctcctaaaccgcgc

SEQ ID NO: 460262 - DNA, 209 bp, Sorghum bicolor
ctccttgaccacgggctacgctcaagcaggacgcggccctctggacccctgcgcccgtctccgccgtcagcgccgccaccgccgacggctccatctcctgacgtcgtcgtcgacctctccgacgccgctgacctcgtggactcgtacacgaccccgggcagtacctcagatccgcgtaccctttgccgggccagctcagccggcgtcat

SEQ ID NO: 460263 - DNA, 169 bp, Sorghum bicolor
cgtccgccccgctcgacgtcggcgtcagtgaacgacagcctaggcgtcaggaacgcgtctcactttctaagcgagactaccgctcggccggtcacctgttctcgttcacatagcctacgtccctgcacttagcgtggctagcacgccgatggccaccacgaccgcgagc

SEQ ID NO: 460264 - DNA, 349 bp, Sorghum bicolor
  unsure (1)..(349): unsure at all n locations
cgtccggagcacccagtccctaacttaagctatttggctatttgcatccggatctgcctctcaccggcgtcggttgcgacggcacaacctggcactagtgtggatctgctcctcgtagcgacggccgcggctctgctcctggcagcagcgcgagcgtagttaccagcgacggcagggcgtgcgacacggggcgtggtgggcaggtgcggccgtgcggcgggcggactcggcgtgccactgctgcggtgaccgtcgggctcgggtgtggcgagcagcacgcanggagtagcctcgacccttggtagtcagcacggtgggcagatcctgcacctgcaggttgcagcgggtg

SEQ ID NO: 460265 - DNA, 392 bp, Sorghum bicolor
cgtccgcataatctgagacaactacagttcatcatcaagaatagctccaaacttcgcaggaggctgatggacaaggagcttgatcctgcagttcttttaaccatgtccgccgatgaattaaaggctggcttgacttcagcagagaaaacatctgaaccagaagaatcaaggaaattgcagatgactgataaaagatgtgaaagatgcagtgaaaagaaagctgtcatatctaatattatccatgcaggtcatggagaccgttatcagttggaatgtacttcctgtggatgcacatgtttttcgtccatagatgccattacaacactgacagtagatgccccaaccactgctggtaatgtggttaccgccctcttgtcaacagcaaagtttga

SEQ ID NO: 460266 - DNA, 107 bp, Sorghum bicolor
cgtccgaaaaaaaaaaaaaaaatcaccaccctgcaactgcaataatggcccagactagcatgaggatggtggcgctggccctggtggccctcctggtggtggcggcg

SEQ ID NO: 460267 - DNA, 61 bp, Sorghum bicolor
cgtccgcccacgcgtccgaataaagaagcagcaatacttccatcaagaaatacttttgggt

SEQ ID NO: 460268 - DNA, 62 bp, Sorghum bicolor
cgtccgtaaaaaaaaataataaaaataaatatatttgtatattagaaatataaagtattatt

SEQ ID NO: 460269 - DNA, 60 bp, Sorghum bicolor
cgtccgaaaaaaaaaaaaaaaaaaataaaaaaaaaaaaaaaaaaaaatgggcggacgata

SEQ ID NO: 460270 - DNA, 439 bp, Sorghum bicolor
cgtccggatgaacctgatcccatcatctgtccggatgcagtatcccaagctgatgatgtgaactggtgggggcacaaatttggattcgttacaggagggtttctaggagcaaaatctcgtaaaaataaatcttcacaaaaagatcctgctaatgtccgccagacatttgcggaggaagatcaagaaaatttatacaatcttgttcaggataaagctacttctggaaagcagggtcttggcatcaaaggcctgccaatgaaagttgctggccaacgttggaagggaaacaaaacttcgtttgttgatagcgatgatgataattcaacccaatccgatgaatattcagaaattgaagagagtgacgataaggaagaacctatcagtgcttctgaatcaatagacacagacaagaatacagaaaaggaattgcttgtggatg

SEQ ID NO: 460271 - DNA, 436 bp, Sorghum bicolor
cgtccggtcggaggccccagcgaccctatcgtctccatcttcttgccgggcacctttctcatcgtctccatgtcggccaccgccagaccttagacgagacgactcaacattgagccagggtgcgagatgccggatccatcagtctgcgcccgccttgagctgagtcgttcgttcctccatggctagccgcaattgatgttggcatggattgcgtcgatgatggcgatggctaagtggcgtcgttctcggctggataaacgccgccacgatttacaggagaaatccatggcgttcgtacctcgctctcttgcagcaatggactaccactctcctcctccaagcaatgaggcaaccgccaggattggcactgatccaagctgtgaagggaaagggacgaaaagaagacagcgttgccaagcagtctggccatgacaag

SEQ ID NO: 460272 - DNA, 194 bp, Sorghum bicolor
cgttcgatccaatccaatatatgtggacttcgttttatttcttttatttgtttatgccttgatctgatatgtgtacctgagcaggccaggccagctttctatgtaattcattcaccgaatgactattggagaagcgattcatgcatcttcttaatttgtttaaaatatatgattattataatatatttattttt

SEQ ID NO: 460273 - DNA, 451 bp, Sorghum bicolor
cgtccgggccaaacgacccacggtgccaaagttcggcgcctgggacaacgacgatgtcgggtacacggtctacttcgacaaggtgcgcgagaacaagggcgccacggcgccgccgctgcaccggccgcacagcctcgacgacccggaggaggggcccatgatgagagtccctccgccgtcgtcgtcgaggccggccaccgcgggaggccaccgcgaggcgccgccgtcgtcgaggcggcaccacgggcagggcggccaccggcgaacggagagcagcagcagcgtggcgtccgacccaggctccgcccaccaaagcaagttcgcgccgccgccgcagtactaccaacgcacgagccacggccaccaccgtcaccacagcggtggccaccaccaccaccagcagcagcagcagcagcaagccccgtccttccacggtcacggccaccgagcc

SEQ ID NO: 460274 - DNA, 166 bp, Sorghum bicolor
cgtccgtactaatttacgataatatgtatacatatttaaaaaaaaaaaaaaaaaaaaaaaaaaaatatataataaaaaaataaaaaaaaaaaatataaaaagggctaccaatatataaaaaaccaatgctaacgggccggcccttccattggctccaggttttctt

SEQ ID NO: 460275 - DNA, 122 bp, Sorghum bicolor
cgtccggtcgaacgcatggatatagcagtatctgagaaaagaaaagaaaaaaggaaaagaaaaatgttaactgctgtatctgagaaaagaaaaaagcaaaagaaaaaatgtaacttacaaaa

SEQ ID NO: 460276 - DNA, 372 bp, Sorghum bicolor
cgtccgtgatgtcacagctaaatttcaggagattaatgaagcatacaaggttttaagtgacccagctaagcgactagaatacgatgtttctggttgttatgagattgatcaatatactttgcgtgagtaccttgcaaaatttaagggtatgatacttacctgtaatggccttggcatagatcatccttctagtaaatgggcccgacatttgagggaactgaagccccattgatcgacgggtactgattgtaacattgttgatgctgatcggatttactgttccatgtaagacacaattgtgttgtatcacaaacaatgattcccttgtcacttctgggcaataatgcatgtatagtaagggtctattttgtt

SEQ ID NO: 460277 - DNA, 453 bp, Sorghum bicolor
cgtccgtgaaaactctctttccccttcccggcgccggagtcggagaaggccaccgcggtgcgggcgatggacagcaacaacctcctggcggcgtggcaggtcgtgggcccgggcgtcgccggcgccgtattcggagccggctggtggttctgggtcgacgccgtcgtctgcagcgccgccgccgtcccattcctccactacctcccagggttcttcgccttgttcgccgcgctcatgttcaacgccgtcaaccgggaggacatcggcgatggttactattcaccgtacgactactccgaatggagggtgaaactctggctttttattttatatgtggagtcttttgtctcgttggctggatcagtcggttttttggtttaagatgcccttacagatactggaccattttgcgtggactggcactggtggtgttcctgcattgcggtgttttgt

SEQ ID NO: 460278 - DNA, 296 bp, Sorghum bicolor
cgtccgaacggcttgtagattgtgggttcaaaagctactgcatccgtcccaacataaatcaacttttggagttgtatcattaaatcaaattattttaaagttaactaaatttttataaaaataccaataattatgacaccaaattaatatcatttgatatatcataaaatatattaatatattatggatttattttatgttatagatgatgtcactttttctaatctaactcaaaatattttgtctttatattatgtggttctaaaatttgatttgatttatttaggacagaggtt

SEQ ID NO: 460279 - DNA, 121 bp, Sorghum bicolor
tctaagtgcggcctaacatgcaatttgatggccgcgtgcgtgtgtgtgtgtcagtcgatgatagagctggacgcatgccacagtttatgcggggcttgcgcgttctccttttttttgtgtt

SEQ ID NO: 460280 - DNA, 443 bp, Sorghum bicolor
cgtccggtgaaatggtgaaagccaaggaaggcgtggagagaaagctgtacggatcatacagccttggcagggatgagcccagcttggagccgcaaggctcctcctccttgccactgtaccatggcaaatacaggagttattcgttccacagctcacagaaagagagcattacgattttccacagttcagaggatagtactaccagtagctgctctgatgatagcgagagttgcagtggtacgagttctggagaaatggaactggatgagtctaagttagcagaagaagctgggccctccaacactgcaaatgttgaggagggagttcaacatgaactagaaaaacagcaccagcattgcagcgccccataacccttggttgctggaaggatcagagctagaattgattgcaattcggaacatgtctggaaggacaatatactg

SEQ ID NO: 460281 - DNA, 326 bp, Sorghum bicolor
ggcccccaaagctgtatagggggggggacaaactctccccctaaaggattttgcccccaaaaaacctccctcccttgaaaaaaggaactcccgtttttaaaaactaaaagggaaaaaaaattgtttccccaaagggttgtttcttaaaccttcaccgggtctgggggggttttttgttataaaaaaaaaaaggcggggatttggggggggtcacccccttttttactttaatttttgggggtgacatctggaaccctcttttttttttttttttttgcccccccccttttttataaaaaaataaaaaaaatgggtgggaacgggtg

SEQ ID NO: 460282 - DNA, 78 bp, Sorghum bicolor
aaaaaaaaaaaaaaaaaaaaaataaaaaaaaaaaaataaaaaaaaaaaaaaaaaaaaaaaaaaaaaaaaaaaaaaaaa

SEQ ID NO: 460283 - DNA, 309 bp, Sorghum bicolor
cgtccggaccatgtacctgcctcaagctgatgcatatccagtcctacccggtcaactatgacctcagggtcggcatttttctttagagccacttctaaaatacccaacatcccctacatgaggggctcactggacacgctggctgcgttcaaagagcccatctggctcaccgattgtttacgtaaccaaagggcccaagcaggtggagttcctcttccttctggccttcacagccaccgcctaggcccgcgttgtccatgagctgatctctttgaactcatgccatcagacattcaaccaggtgcactt

SEQ ID NO: 460284 - DNA, 449 bp, Sorghum bicolor
cgtccgctcggacaagtcagttcctcgcggagcactgtttcaaagcaccagcttgacagtgttctttgttgttgctgagctcgtctcagccctggcttttgcaatgttgttgtgggcaactatcactgagggacttcaccgcagcaagaacatccaccacgacatgaattaccagtgccctactgcaaagaccggcctgtttggtggtgctgctttccttgcccttgacgctgctctcttctggcttgtttgccagatgctggccctcaatgcaagggctgactacctggacgaggatgacaacaagggcgaatatggccaggtttatgccgatgaagtcgatggctcgaaggtctgagcctatgcagtcatgcttgtcagggttttatgattagtgtcacttaactatattgtgtcatcaacaaagtcgctttagctctcgtaaattt

SEQ ID NO: 460285 - DNA, 139 bp, Sorghum bicolor
cgtccggccacacatcgggtgcggccagactagaggcggcaagcttacatgctccagcctgacacgcgcgagcgtgctaatagagagatctaatatcaagtcaccgaccgtcaattcacagcgcggcgactgacaaaac

SEQ ID NO: 460286 - DNA, 83 bp, Sorghum bicolor
cgcgtccgccatacgaataaaaataaaaatgagaaaagacaaataaaaagaaggaaaaaaaaaaaaaaaaaaaaaaattaaag

SEQ ID NO: 460287 - DNA, 461 bp, Sorghum bicolor
cgtccgattggatcaacaatgtgttcctgacgggcaagttggaagctgagaagttcctacgtgagaacgctgcagtggcagatgagatctgcagtaccgtgagaaatgagctcttgcataggtgacatacgaaggccactggaagttggctctgactcgggttgactaggtgcagttatcgtattaattggggcacactgcacctccaagcaaccattttaagtagctgccggtttatgaatacccttacagccttactctatgatatgatggaagtaaagctaagcgacggcgaccaattagagaggctaatgtattgtgagtcggtctgtcttgatcccttcatgaatcatgaggcattgagatggaaatgttgtacaatcatgtattcgtagatttctataggatattgctgtgcctgttgtgtaactttgacttggcaacagttaattgagtttacg

SEQ ID NO: 460288 - DNA, 453 bp, Sorghum bicolor
cgtccgcgagaactgcccgtccttacctccaacatacatacgacccgcacgctgctgactatgagattgtcgtctatgtatctttctgcggctgctgcgtttacacagtagcagttgagtgctgttgctaagttgctctgtaaataaaagacactgtatatataggcgtttggtagatggtagttgttaccagtaacctagctacgacgtattcaggtaacaggttcacgggtttcagtcgatcagtcttgaagccacggcgtgggcgaccaatatgaacgttaggatttgcccgctcccgaaagtgtgcttatatgtatataggcaacattgctacttcatctgtgggcaatattcttggttataatgcgcgaactccaggaagacatgaatctacaatgcaacgtcatcttattctgagtccctgcgttcgggttcgtggacaacactggc

SEQ ID NO: 460289 - DNA, 459 bp, Sorghum bicolor
cgtccgcccacgcgtccgttggtttggctctgagttcctgcgtctggtggcccaacatatgcatctatttgtttcaggactcaggactttcggttgacttgacctgacagtggttgggtcatcggaaccttcataacattataaagcaactttgaactggtcaattacgacaatcggtccctgtgactatttcgcgatggatgtagttaattggttgatgtgattgggtatggaagtttgcaagcgtttgaaggtgctccacttctagcagtctgattttttcgcatgcttaaaagttctatggaagagaagactttgtttttcctgcggttaaatttacgattgtgcggaggcaggtgcataatgcccagacttgcacaatgactacttgtccatattccaacactatacaccgtacggcggacgctttcagatatgctttttcagaagcatggtcat

SEQ ID NO: 460290 - DNA, 431 bp, Sorghum bicolor
ccgcccggtccatggaccgaccaggcgagcggcagaccacgtagttggtgctgtccgcggcggcagctttgtcttgtttcttgtcggcgccgacgaagtcgtcttccaccatgcatcaccccatcctgtcgatagatcgagcagagggctccatcttgcggccgtaggacaaggtgcagaacgtgccgccaccggatccatggacatccttgcggcctatctccgagtgccaggccgtgccgccgccgccggtgaccgcacgctgcctgtgcccgctggtgtcgcctcgggtgttcttgtatttcttggcgtggtagaagtaccagatcctgctgaagccgtcatcgtcgagaccggtggccggcaccggctccagatcagcgacgagaacctcggaggagcggcgcagacgtcgatgcggtggacgaagt

SEQ ID NO: 460291 - DNA, 466 bp, Sorghum bicolor
cgtccggaggcggcagtggtcaaaggttcatcaccaccagatcaaaccacgagcatacggtgatcataacttcaccgctagatcaagtggtccagtggtggtacaactctcatcagtattagatcaaataatggaaccacgatggtcagatactcgtcaccgctgcattggaccacggaccgccggaccggtggcaagaaaacatccattattgcctgatcaaatggtgagccgccgatgatcattatctcatcactgccaaatgaagcgatgatctgacagtggtagaaggctcataaacgctagatcaaacaatgaccagcagtgagcaaatactcatgaccacaggattggaccactggtggtgactgcaaagtttagaagaagaaaccagaatcaaatcttccattttagagtcttcagatacatatacatgtgtacaataggcacttgggccatgggcctt

SEQ ID NO: 460292 - DNA, 401 bp, Sorghum bicolor
cgtccgtttttttttttttttatcacaataaataatacacaccattattatattatcacctggccaagcggccagtgtacacaacacgaaatcatctccatgcatgcatgtcctctctcatgcgcaacacagtagtaagagtagtaactagtgaaagcagaagcttgagaaagcatgcagagtaccggtagctaggacacacagatgtgtctcattctccagacgtacacatgatcgacgcatgcacagccatccgatccatagtcacggacggtgcggcatgcatggtctatggacggatgctacgcatggcagccagctggagctggtgacggcgagaggcaagcagagagggtccgtgcctccggagggaggcatctaagggcacttgggcctggtgc

SEQ ID NO: 460293 - DNA, 470 bp, Sorghum bicolor
cgtccgcgacatacagacttgcttctggtgacgccggaaatagtcaagaagacatactgttcgaagatcatacaagagctgatggatctccttccaacagtgacaagttgagtggtgcagcaagtcttaagattgaaatttctctgttgaatataagaatgagggcacttgaagaggatcaggagtttctcaagcaggtattgagttccctccgatgtggtagtgatggactgcagtgtatacatgagataaccagccatttggcagagttacgaagagctgtgactcattaaggaaaatgtttttgccccgagttcacactatttggccatcatgaggtcttctcatgcagatatatgcaggctaaagagagcgcttccagtgagtgcccacaatgccatctatcttaaatcgtacaaacctgaagactgatgccattgcaggaatacccatgctgttcactcctgatc

SEQ ID NO: 460294 - DNA, 95 bp, Sorghum bicolor
cgtccgaaataaaaataaaaataaaaaaaaatataataaaaataaaaaaaaaaaaaaaaaaaaagaggggggaaaacaaaataaaagggggtttt

SEQ ID NO: 460295 - DNA, 184 bp, Sorghum bicolor
cgtccgaccattaagcctctctacactctcgctctagctcatctatgcctagttggacttgcatgcgctggtgctgcacaaatgtgcactccttaccacctacaatccgcaggaaccattataaacatgctaacgaacaagacgcagctgccactgaccttgacacactcgccgtcagttgatc

SEQ ID NO: 460296 - DNA, 441 bp, Sorghum bicolor
gggtcgacccacgcgtccgccaggtgttcgtgcccatcgatgacctgctggccggcgccgacagagggaggtgactcgaggcccgtgagctaccaagtgcgcaggcccaactctggccgcgcccacggcgtcttctacttgtgctataagtgcacagacgtcccggccgtggcgtgcgtcccggaactggaaggcaaacaaggccggcacgccaagtacgtgctggaatccaggaacacgacggacaatgcgatggtgccgtccaccgactactcaccgtcggccatgcagcttacgtaccaaccgacggcaaagtgggccggcataccatgagacgcaatatggctcgtcgtacccgggctacccgatgcagccttactggtacgctgctgcgccaccgaacgggtacaaagcggttaccctacaacccgagatgtacgg

SEQ ID NO: 460297 - DNA, 395 bp, Sorghum bicolor
cgtccggttacaactacagcggatagtaaagggacaaagtcaacacgtacgatcaagaagagaactgtgcgaaggaatactcatgtgccctcgactaacatgagagatccatatggaagaaaagaacatgaggtatcagttgacaagtcctgcacaccaaacggaaggatgtaaactctacctgggcatacaccaatttcacaacatattgagaaatggacacaaagagcatcacgacattcctaaacgatacaagctaacacatcatgaatatgaacttgacactgacaaatggaagaatcacaaatgtgcaggagaactcggagcactgtcatgtgtggtgaaccacacactcaaaaatctttacatattactgctgacaaatatgttacaaa

SEQ ID NO: 460298 - DNA, 54 bp, Sorghum bicolor
cgtccgataaaaataaatatgatagcagccgctctataagaatcctaaaattac

SEQ ID NO: 460299 - DNA, 86 bp, Sorghum bicolor
cgtccgctggattatttaaggtacgagtacgatatactgtacgtttggtctttttttctttaccttgattgagaatttgtgattat

SEQ ID NO: 460300 - DNA, 273 bp, Sorghum bicolor
gacccacgcgtccgcccggtccgccgccgctgcggcggcgccgtccgccgaggggagcgcgaaggaggagcccgaggaggactcgtcggcggctgctccagccaccgaggaggctgccgtaaaagaggagtaaggcgtcggaccacgctttgatccaccgacaattgctgttattttggcatttcgtcggaatgttattcatcgtttgcccagcctatgtctactactagtatatctattgtctatctattagagattgcttgtgacatataa

SEQ ID NO: 460301 - DNA, 172 bp, Sorghum bicolor
cgtccgctcaaatgttgtacgtagcgcacgctgtagaatgaatatgctcacgtgcacgtatggtgcgttgaagtttcatttattagcttaaaatgcattaagaaccaatggcttgatttgccacacgcccaaaatgaaagcacactcccaaactcctaaaattaaaggaatt

SEQ ID NO: 460302 - DNA, 77 bp, Sorghum bicolor
cgtccgcggacgcgtgggaaaaaaaaaaaaaaaaaaaaaaaaaaaataaaaaaaaaaaaaagggcggggggaatgtg

SEQ ID NO: 460303 - DNA, 268 bp, Sorghum bicolor
cgtccggggcaacctaattgtgcacgcaagcatagaggcgtcgaacttttcctgtgctgggccataatgcaaggatttgttatgatgttgcataatagatatcagcgtcaaagattatatactaggattgctttggggaacgctaaaagaatggatgttgtatggggagagactgctggtgttgaaggtcaattgttgctgttgtgccctctacttattttcttgcagggcttttagggttatgttggattttactattttgaacagc

SEQ ID NO: 460304 - DNA, 347 bp, Sorghum bicolor
cgtccggcgcggtaaatactaacgagagccgcctagaccaatgaaaggtggaggatcatggcaagctgaataatgctaatatggatggtctgtatatgcaccggaaaaggccgcgtggaacgcgagctgatatacaagaacccatgccagcagacatgcaatcgtgtgcaatggaagaagataactccaaacatgaagaaagcttcctaaagtgactaaagctatggaggctcttactcgagtaaggccaagttaatgggacaaggggtatgaagacaaaaatcaggtggacaacttctctaggaggttccacgagggcccgtctatggaggacattctgagaatct

SEQ ID NO: 460305 - DNA, 436 bp, Sorghum bicolor
cgtccgggcagctgaggatgagaaagatatggcaagtgcttgctttgactcaggtgaagttatgggaacatcagctgttctaccgtcaaacatcaaaactgggcctgccaattgcttagccaatatacaacagaggaatgctactctttgtagtctaccaacacatggccaactaagaagggacttaatcgagcacatctggcagcagtttgggccatttggtgacaagtaaaataagttctcctagtctaaagtttataatggacatcctttgatgcacactagcatgtgctgctaccgttgatgcttggaactgacggtgagggagatatatatgcttggaactgtatttggcatccacatactgagtagcaataatcccccttcagtagccttttaccactatttttatgtgatgccatcctgaacgctcaaa

SEQ ID NO: 460306 - DNA, 415 bp, Sorghum bicolor
cgtccgcccacgcgtccgtgtggatgtgccttcacctggcctcgaggaggtcaagattgcggagacaattaaagcagagctccaaaatttgaggggaagcaacggtctcactcattcattcaacagcatacagatcgagggtccatgagggcgccaagcttgagaaggggccgcgcctgagacagtggtccaaagagaagctctggttatcttgtccccaggaacctatgctgtggtgggaaaagtgcctcttgcttgcaattattggctggtggcttgatcagggcgaatacagagcgtagtagagaacgggattctaataactggatccaagattggtatgcgtttctaattaacctagtgactagactagtgagtatgtattctcatgcttaccgcatggaaatgtgatggt

SEQ ID NO: 460307 - DNA, 455 bp, Sorghum bicolor
cgtccgaacaaggcaacaacccaacccatcagcccgtcaggacccgggccagaccaatcaggacccatcagcaccggcgcggcgcggcggcgaccagggggtccagggcgcgaccgggaccggcggtcgaggcccagctgctgcggatcgcgtgggggaggggagaggcggctgtctgccggatgtcccgcggcggcggggagtagggcgacggcggccggcggagatcggctgcggcggcgcgacgcggcgcgggagggcggcggcaccatgtctgcggtagtctgtggcaagaggtcctactccatcttcgccgacgagctcctgccgccgacccctgcgtgccctcactactactccccccaacaggcgtcgggcaagcggtcccgccggtccccctcataccaaggtggcggcggcagcagcaacaactgacgccgacgggaggcgctcgt

SEQ ID NO: 460308 - DNA, 452 bp, Sorghum bicolor
cgtccgggtggctccagcatcggccggtatgacggtctttgggccacgacgcggtcatctgcggctaaaggtagatctggtggcgccgaccctctcccacgatccatggcaggcttccttctatgcaggctggtgcacggaggccctgtttccctaggcaatggtcgctacggcagcgacctttctcaagtaatcttgtcatggccagcaattgctttagatctgccaacgtctttacgatgcaggtgccttactatgctatgggaggggctgcaacaagtatgaatatacacctgatctacatatagctacgcatggtgtgatcaatgatccttttagataccaagcgaccgctataggcgctatgtgccttggatgctggccgcataaatcggagtttcacaatcatatgtcaatcccacgaattcttataggttccgatggctatattt

SEQ ID NO: 460309 - DNA, 242 bp, Sorghum bicolor
cgtccgcggacgcgtgggcactgatcataccatgcatctatcatccatccatccaggaccaccaccctgtgcttttacatttctaatgtctttgtgcttcagcgtcaccgactgaccccccggcccagcccacctactaatatgtccactgtactctagtagtatttcgtcatttcccagtcttttttgctttggtttgtcaattgtcaattattaactatataaatattcgctccacaaaa

SEQ ID NO: 460310 - DNA, 464 bp, Sorghum bicolor
cgtccgcccaagcgcctttactgaacaagatttggatgagagaataatgaaacaactgcaagaggaggaggaacggaagcggcaacgcaaagaaaagaagaaagagaagaaaagagaacaggcagcccaacatgaacctgaggatgttgaccctgacattgctgccatgatgggttttggcgggttcggttcctcaaagaagtgaccgctctgtgtgaccttcatggcttcgcccctgaagatattgctcgaccccataaacaccttgctacaaagaatcattttgacagatctgcgataagatttgaatggactggatgcaaggatactgcgttttgacactgggatattgaactttgtgcatgggagttgattgtcaaatggagcatctatgggtgttttggagtaaacatgtttatttgttacttgggggattccggccatagaaaccgttggcagtcgtg

SEQ ID NO: 460311 - DNA, 324 bp, Sorghum bicolor
cgtacgaaaaaaaaaaaaaaaaaaagaaaaaaaaaaaaaaaaaaaaataaaaaaacaaaaaaaaaaaaggggaaaaggggaaaaaaaaggaaaaaaaaaaattaaaataatggaacaattgtttaaaaacaaacgtaattggaaaaaccctggggttaccaaattaaatgctttggaacaaaattttattttgccaaattggattaaataataaaaaggccggaactaatggcctttaccaacatttgaaaaccctaaaagggaaaaggaaagcgctttttactaaataattaaggccgggggatatgtggttaacaacaaatg

SEQ ID NO: 460312 - DNA, 212 bp, Sorghum bicolor
attgacggatgcacccacgcgtacatccacgagtggcgctatttatagaacgcaagctgacgttctagagcatgcaaccttacatacgcttgcttgcgacaccataactctattatcgggccacctaaatacaacgtactgaccggcgaaacacaacggctagacagcgaaaaccctggggagaacaaacttaattggctagctggacatat

SEQ ID NO: 460313 - DNA, 290 bp, Sorghum bicolor
cgtccgtccacacatacaaaaacgacatacaaaaagctaaaggcagaaaaaaaacttatgagaccttggggggtcgatttaccatgcaataaaagtgtcttcaagacgtctcaatggtaccttctattcacaagtgcacgcaacttgtaactagaagatggttgtgctcacttcatttacaaaggaatacattgaccaagtgtataatatagaagaattgatgctaccgtttgaccatctgtggaggataagatacctatggctatcataatctgttgtgctcgaagcca

SEQ ID NO: 460314 - DNA, 376 bp, Sorghum bicolor
cgtccgaacacattgaagaaaggaagagaaccagataacaagaataagacaaaaaatggacaatattgggcacagtgttttaagggtcccagctacacaaatacgtgagtgcaagaagattgcgtgcatacacattgatgtaagcacggttcaataacaagagactgaaacatgggcacactgaggaagaccgtgatactgcgccccttccaatatatgtcatacatgaagtatggtaaagaccctgaaatgcacaatgggttcccatccgatgtattacatatcgcatacatcgcttgggatgggcctggttcccacaacattaacagccactataatgctggaggagcacctcattccattaaagattaccatt

SEQ ID NO: 460315 - DNA, 247 bp, Sorghum bicolor
cgtccgctttatggtgatgttgctggtggcggcggtcttgttcttggtgtgagggagtaggacaagaggcggtgtgacgaggagcagcacaaaattgccatggtaaatggtatgattgaaagattccaatacgaatggttctcaaagcatgatgagtggcgactttctgtcaactcactgggggggcagaatggaaggactctatatggagattgagcttctgaaagaaaacatacaagcaagattt

SEQ ID NO: 460316 - DNA, 140 bp, Sorghum bicolor
cgtccgaaatatagaagatgttgctggaggcggaggtcttagtatcttggtgtgagggaattggagaagaggcggtgtgaggaggaagcaagcaaaaaattgccatggataaacggtatgattgaaaagattcctttttt

SEQ ID NO: 460317 - DNA, 94 bp, Sorghum bicolor
cgtccgaaaaaaaaaaataaaataaaaaaacttagacagaaagaaaaaaagctgcaaaaagaaaatgcgggtgcaaaatacagctgaaagtgca

SEQ ID NO: 460318 - DNA, 121 bp, Sorghum bicolor
cccggtcgaccacgcgtccgcaaacagctcttgctccggatacaagtgcatccagccccccgagtgctttgtttatgacgaggtggcgcacgagacctatatgcaccatccgccgatcgct

SEQ ID NO: 460319 - DNA, 453 bp, Sorghum bicolor
cgtccgcttcagtgcgcgctcagtcaccggccccgacgcctgccgtgatgcctgctgcgccgccaccgccggcaccgacgacgccgccgcctgcaccggcggcaccatcccaaaactcatcatgcccttccggctttcctaactcagcctcattcgctcgaggcgtgagagagtatcttcgccgtggcatcattctcatcttgtccgctgtcaaggtcaccccaggcaccagcaccacaagatgcttttgctatttctctaccaacatcaccatccccgttcccttctcgccgcccattatggtgcccaaccccaatggacccctcgcatgcgtgccaggccgccaaatatgatatagcacgcctgagattcagcgtgctggcacgctggcacacgcactagtatactatatagtatatacgtacactatatatatatatatatatatgaata

SEQ ID NO: 460320 - DNA, 418 bp, Sorghum bicolor
cgtccgcggacgcgtgggcgcacccgcaaccctgcaactaataaaaaccatcggctagcgatggccggagcccgcgtgctgctcatcgtcctcgcggctgccgtcgcgctcctggccgcacgcccggtggcggccaccgggggagttgccggtgtggaagaagtctgcaggagcacacctttcccggatctgtgcaccaggacggcggggaagcacgccgagaagtacaaggtcgtggacgcggtgacggtgctggagatgcaggtggacgcgttcaagaagcgcgtcaaggcggcgcggagggtcgcgaagcaggaggtgaagacggcggcgccgacgcccttggtgcggagggcgctgaacctttgcaagagctactacctggacgccggggacaaccttggcgcctgcaagcgcg

SEQ ID NO: 460321 - DNA, 290 bp, Sorghum bicolor
cgaccgtccacgctttcgctggagccaagtgaaggcattttggtgcatgctggatctatcttctgtttcagctccaggccatgggaaggcccattcctatgctcggactgtcttgacatgaaggatgccatggaaggcaaactacctagtggtgtcaaggttctgtagtatacatcatccaattaccattgtagcttcctgaaaatatccactctcctttcctttcttcatgaggatcctttcagggttttacaaatattgtctttaattcctggggaatacggatgatt

SEQ ID NO: 460322 - DNA, 123 bp, Sorghum bicolor
cgtccgtagatctagagcgttagcgacctcattctcatatccaccattacagacccgtacatacggcgtaaggagttttctaaatacaaggctaaagccaatgcacgggatggtcttgtacat

SEQ ID NO: 460323 - DNA, 388 bp, Sorghum bicolor
cgtccgaccgtgaccgtcgacgacacttcgtcgtcggcgtcggagttcaccatcaacgtcaagtcctaggagccatgcatgctactatacgcgcagtaagtctggaggagatttaattagttattaattagttctttatttctttctttctggtgaataaacagatgagagagagggagctagagaggaaggaaaggagacgtggcatatgcagtgtggccacattattagtaaatttcttgctcggcgatttttgtaagctactatatatgccacattactagtacagaaaagattttttgggcagtctaaaaaaaaaatataatataataattataatattataaattttatttatagtattcttttattaatatatattattggg

SEQ ID NO: 460324 - DNA, 188 bp, Sorghum bicolor
ttttactattctttgatcagattatagtaagaatattgttcctagtcatccgaaaggaaataatcaaagttcgtgctttatatatataagtatgtacacatacttcatattctaagtatgtacacatattatatattgtatgtacacatacttcatactctgagtatgtagccatactacatagcaag

SEQ ID NO: 460325 - DNA, 446 bp, Sorghum bicolor
cgtccgggctaaagatctctgtgaggttgcaaaggctcagaacaaatccttgtggagatcatgggaagagagcacagatccatgtaagaaaatgttggatctgttgctgagactgatcttccttgtggatattcagtcattcccctacctgctgaaggagctggcagaattcgtgaccctgctaccaaaggaaggccaggatgcactgctcgatgacatgcatgcccatgtcgctgagtctgacgatgtcactcggaagccagtacttgtttcgtggctgcagtccctctcctacctaagctcgcagtcgagccgtgaatctcacagcaaggccatgagtgctgctgcatccgtagcaagcgatgaactgaccctgaacagagccatggcacgcttgtgataccaatgcttgtaaaactagcagtacataatacggaaaacggttg

SEQ ID NO: 460326 - DNA, 458 bp, Sorghum bicolor
  unsure (1)..(458): unsure at all n locations
cgtccgcgcgggctgaagtgccaggcgctgacggatantacggggcgctggaccggagagctctcccaattcttgcgtatcaccctagtctgactgcgctataccattcctgttatccttcacagtcatcctagcgagctcactggcgtccatctaggggaatgtttcagaatcccggcgaatcctcaagagcggcagcagccgccacagacacaccttccctggttcctgcagaggcgccggcccctgcctcagcatcggacacgtgtaccgttaagccgtcatactgtggccgacctggtcaacggatttttccgtggtttttactgaagccagcactagtacatttggtccaggtctgctacttggctagatgcttatggacacacaccttacaaatatacaaatatctattccgtgtatgcattaacttaatttaacatgaacacacctgcttt

SEQ ID NO: 460327 - DNA, 451 bp, Sorghum bicolor
cgtccgcaagaacctgccgcagggggacctcgtcgacaggctcctggacgagtggaggaaggtgcccgagaagcccatgacggacagcaatggtgtgttcgaggccgagctcttccacggcgagtaccaggtcaccgtcaagcacgcgtcgctcaaggagcccatcgtgcagacggtggacctcgacaccaaatcggaggccgccataaaggcctagctaattaactgcttaagagtactccacgcatcatgtcggtgtcgctcactgtaacattcccatttgtatgacggtgtcgctaacttgtaacattccaatctgtttttctatataaatatatatacatatgatcttttttattccgaaatataaaagtaatttgtatgtatattctacaagtattattaatataattataggggcggccgttttagaggatccatgcttacgtac

SEQ ID NO: 460328 - DNA, 463 bp, Sorghum bicolor
cgtccggtccaacagtacaaggatcaacctgtgcaacaaccaccccctacccctcctgtgccacagcaggaccgctatgttcttagccaagctatcgtctactacccacagtgccaagctccaggtatccaggacacacaggggcaaccattgcaaccagaagtgcaatacttaccatcaagacccgcagcacaagatgttccagtccatgctccatcccagccacctcagactggaaatcaaacacagccacagccttaccctccttaccagcagcagtggcaccagcagtccccccagccaactccagcaccagtggcccagacacaacagactttctcacaaccatttcctccacccgcacagaagccccagctatccaatgtgcagcagttttcaccgcaaccggtacagcagccccaatccaatgctcaacagtatccttcaccagtgcaaccacagg

SEQ ID NO: 460329 - DNA, 465 bp, Sorghum bicolor
cgtccgaaatgatgccacttattcgaaggatggtagaaacagtgagcatgtcatgagaggtttgcgtgatgattctgatgatgctattgatgcaaagaaatatttatctaaagtcaatgaggactcccaattggaagatggaagccctttgaaaaaaactaagaaaagaacatatggtaatagccacaatgattctggtagttcagggtctgaagaacgtgacaaacatagatcccactctgagaagcgaaggcacaagaaagctcataagcataagaaacagtatgatgatagttctgagtctgattctgagccagatggcaaagaggcaaagaagagaaggaaggaagagaagaggctaagaaaagaggaaagacgtcgaagacgtgaagaacgataccgcagaagggcggaacgccatgccagcaagcaaaaattaaagaatactgatactgctgctgtgcc

SEQ ID NO: 460330 - DNA, 119 bp, Sorghum bicolor
cgtccgaaaaaaaaaaaaaaaaaaaaaagaaaaataaaaacaaaaaaaataaaaaaaataagatataaaaaaaaaaaaaaataataaaaaataaaacaaaaaaaaaaaatattaaaata

SEQ ID NO: 460331 - DNA, 301 bp, Sorghum bicolor
cgtccgcccacgcgtccgtagacacgttgtggcatcgcccaccacagctcagggccgccatggttcgtccagttccagggggccaccagtggcaatggctgtgccagtgccaatggcggagccggaccttgagatcgctatgcctcctgcccctgcatagagcgcttatatatatatccattccaggggagttcactccagctccagctagcattgtttgtttgtgtgtgtatacaatagctccagcttttgttttccgtgacctccatctccatgtatgaatggcctatatatggtatat

SEQ ID NO: 460332 - DNA, 228 bp, Sorghum bicolor
cgtccgcccacgcgtccggccggcccgctccacgcctccgtggacgccaagctcaccgccatctgccagtccctgacgggttccaagaacggcggctcctccggcgacgagtcggccgggtccccgccggactcccccaagtgctcggcgtcggcgtcgacggagggggaggaggagtcggtctccgacggtttcccaactatcacgacgctggcgcctaccgtgcca

SEQ ID NO: 460333 - DNA, 151 bp, Sorghum bicolor
cgtccggttaagttgtacagtcattcgttaatgcaaatatgcagtaaacttctgggtcatgcatgcaaaaaaataacaaaaaaaaaagaagaaaactaaattaaataaactaggtcgtcgttttacaaacataacgtctggaaagcgctcg

SEQ ID NO: 460334 - DNA, 219 bp, Sorghum bicolor
cgtccgcggacgcgtgggaaaaaaaaaaaaaaaaaaaaaaaaaaaaaaaaaaaaaaaaaaaaaaaaaaaaagggaagtcaatctagtaggttcctaaaaatataaacgcgggcttgcgactgtcatagcttcttctttagtcgacccctaaattcatttcctctggccttttttgtacaacgtcttacatgggtgaaccgtggtgtctcccaacttaac

SEQ ID NO: 460335 - DNA, 223 bp, Sorghum bicolor
cgtccgaaaaaaaaaaaaaaaaaaaaaaaaaaaaaaaaaaaaaaaaaaaaaaaaaaaaaataataaataaagatcggaaataacaaatggggcccttgactaaaggaaccctgctctcccctttctttgctgttctggtgaaagaggcccagcccttttgaggtttaggcggtttaaagagaaaggcccgccccaattttagtttttaggaatgggttttaca

SEQ ID NO: 460336 - DNA, 100 bp, Sorghum bicolor
aaaaaaaaaaggcctttctaaaaaggcgcagcccgaaggaagaaagagactctccctgtagcggagcaccaagggcggcaaaaacggaggcaacccgccc

SEQ ID NO: 460337 - DNA, 450 bp, Sorghum bicolor
cgtccggcgcgagatgccgagctgccgcgccggcgactttaccggacgacgatgacatactctccgagatcctcctccgcctaccgccgcggccctcctcgctccctcgcgcctcgctcgtctgcaagcgctggcgccgcctcgtcactgatccccatttccgccgccgctaccggtcccgccacccgaatcccccacttctcggcttcttcgatgaatctgcacacttctctttcttcagatccgcgatggacccgccggatctcatcccacccaagcgcttctgtccgccgatcgccgatgagacgggcggctgtgaccctagccattggagaaacttcggatgtcgccacggccacgtgttcctctacaaccggaagcagaaggagataccgagttgccattccaccggagttggataaggaagagaggatgatctggaggggcgcg

SEQ ID NO: 460338 - DNA, 67 bp, Sorghum bicolor
cgtccgaaaaaaaaaaaaaaaaaaggacaaccaaaaaaaaaaaaaaaaagctaacctacaattgagg

SEQ ID NO: 460339 - DNA, 104 bp, Sorghum bicolor
cgtccgaaaaaaaaaaaaaaaaaaaaaaaaaaaaaaaaaataaaaaaaaaaaaaaaaaaaaaaaaaaaaaaaaaaaaaaaataaaaaaaaaggggcggacgttg

SEQ ID NO: 460340 - DNA, 52 bp, Sorghum bicolor
tcaaaccacctaaaaaaaaagaaaaaaataaaggtcaaacgatatagagaac

SEQ ID NO: 460341 - DNA, 465 bp, Sorghum bicolor
gcttctctaggaccatctggttctctgccaggccgtccctactttcgtcccctttcagttgagcatgatggtgtccaggatgctctaagtgtgcttataactcccaacaccctggatgatataatgaccaaaatcatcactaccttgtggttcatctggagggctcgcaatgagctctgctttcgacaaaacaaatggtctgttatgcaggtacattacgctgtccaggtgcacattcaagccaatgtccaagcgctcatgaaaaatgcaggatccacagctggaaacggcggcaaaataaatgcaagtctcgaagctccaaaaggccacgcatcacaaagcctggaagaatcgtaaatctgtcttccggggatcacttgttgtactgatgcggcaattgaacctgatggaacctcagaagagccaaaaatagcaggaattggagttctaatcagggacaatcac

SEQ ID NO: 460342 - DNA, 301 bp, Sorghum bicolor
  unsure (1)..(301): unsure at all n locations
cgtccgcccacgcgtccgtggagctactgtcacttgtctggacaacccctgagcatcccgtgggcatctgaactctcttttgctgtgtttaacatcctgagcatggattattgtgtagtacgtccggtattggactgaaggggaaaacaatggatccacgtccggtataaactactattgtgttttagtagctgttagggtgcagattatgttctttagggtacggttttggtgaatttgctggtatttgaaccaatgaaatcaactctcttgtnaaaaaaaaaaaaaaaaaaaaaaataa

SEQ ID NO: 460343 - DNA, 447 bp, Sorghum bicolor
cgtccggtagttttcggctacacatttcatcaagcttttgatgctggtgagaggcagcagtagcagtatcttcatctttgcctttggcaaagtgtagtgtactgggtggactactcccagactctttgctgtatgtcatggaatgcggtggccattttgttttttgcgttttattttaacacaccaaaaattatatgcaaccacatcatgctagcagaaaaccttatttattaggtattttatatgtatccttcatttttttatttgtaaaaacatgttatgaaggtcatggatgacaacatagtgtttctcttccattaattttcccttctgcttcgattgcccttcatatgtctgcttctaaaaatttggaaagttttttttgtcagaactaagatgttagtattactttagatggtgattgctaattgggtttcccactttcgc

SEQ ID NO: 460344 - DNA, 420 bp, Sorghum bicolor
cgtccgaccaaaaacagaaaaatgtccacgatcgcaacacacagcatagatcaataatcgtcatcgagccaccgatgaaaccctaacccttggtcttctcattactctccctcatcataagcctgtgggtgctgttctataaggacaagggcatggcactgtgcagcaggccctatttaacccttactgtgatgggcctaaggcagcgggggcgtggcatggacaccgcaagaggtggatgcactctgccatggcacatctgaataggggagcggccctggcacatttagcggggtggatcgatgaaggagaggagctgatcgatcgaggttgcaaaaagcagctaaaactggacggcaaatggctctctccctggagtgaaacgatacgcgcgcacgttttatcgattaggcccaccaa

SEQ ID NO: 460345 - DNA, 437 bp, Sorghum bicolor
cgtccggtgacagtcgcaatggtctagctctgatgcgtgggtttctcttctggttgcagaacaatgtacatgatgatcagttcaagccatgggtagatgattctaaagaacaggaggttatttgtttggtggactgagctcacactgactaggtggctatatcctttgtttgcttgatttggcgcaatggtgataataactctgcgctgcacgtgtgacaaattgtcctcagcggagaatgtaaggattccaatatgggatggaaacctcgatcctggaaataccaggtcctggtctcctggaatacagttcagctgttgaatgaataaatggttcctcattgaaataatatgtaaacactctatcttatgtcattacgtgattacgatccctgtagagttttccccagactggacttaagactctgtccatcttgg

SEQ ID NO: 460346 - DNA, 272 bp, Sorghum bicolor
cgtccgctaacagcctgcgtgcgtgcctgcggcgtcgaccgcgccgtgctgggcctccccatcgccagcgccatggccgagggcaatggcctaccgtgtcctggaggtcaccctggtctcggcaaatgacctcaagaaactgtcggtcttctcccggccgcgcatctacgccgtggcttccatttccgggctcgacctccgcatgcctagccacagcacccaggcagaccagaccaacggttgcaaccccgcctggaacgccgtggcacact

SEQ ID NO: 460347 - DNA, 100 bp, Sorghum bicolor
cgtccgaaaaaaaaaaaaaaaaaaaaaaaaaaaaaaaaaaaaaaaggacggccaacaagaaggaaacaaaactaactaacaaataaaagacaccgggttt

SEQ ID NO: 460348 - DNA, 195 bp, Sorghum bicolor
ttatgattttcttctgttgttttgaaaaccaaagtgggcgaccactattttaccttacataaacaatattgtgaagggggtgcttatagctgcacaacaacacgtgggagaacatagcatactttattttggggaagcctacctataaataatcagagaaaatgaatctttggcatgatcattgagtacccttgg

SEQ ID NO: 460349 - DNA, 129 bp, Sorghum bicolor
gttacagcccattctcctttgctcgggtggcaacaaagaggaacaggccgatcgcccttcccatcacaagcgcagcccaaatggaaagggggatgggccccgtccctgagcattaaattcagcgggtgt

SEQ ID NO: 460350 - DNA, 324 bp, Sorghum bicolor
cgtccgcgtacggaacgctaggcaaattcctccaacctaaagttgctgaagatcacatggcggcctttatagaggtctcgggctctcgactctagcttccaagcttatttccttgatgcagcgcctgcttagttgacttatatggcacgcattttacagcgaactgtcaggcaatatccagttctagcagatcgtaatggtgatcgctcacaactacaatgcctctgagagcgttaccactacaacctgcagactgatatgataacagggctttgctgcgcactgagcttggaacaggtcactctcaatttctgcagaaagcca

SEQ ID NO: 460351 - DNA, 258 bp, Sorghum bicolor
cgtccgcaagatcactggaaaggagcttgatctttcagtcgatttgaatgctgctagtgctgctgagcaagaagctgcttgaacatcctcttatttttgcagctctacatgatagctacttcttctatttttttaaaatcattccatagatggataagtttattgaaatccattgctcatgcttttggagttccatttttgtcacttgtaatgaactacagtggctcggatttataaatgttacattattcactggtg

SEQ ID NO: 460352 - DNA, 82 bp, Sorghum bicolor
cgtccgaaaaaaaaaaaaaaaaaaaaaaaaaaaaaaaaaaaaaaaaaaaaaaaaaaaaaaaaaaaaaaaaaaaagataaaaa

SEQ ID NO: 460353 - DNA, 406 bp, Sorghum bicolor
cgtccgccctgctcgtcctccccgtcggagccgctcaccggaggtcccctgctcgtcctccccatcggagcacctgactaccacccgccgctagaggtcccctgctcatcctccgcgccggagcacctggccaccacccccgcgggagcagatcctcagcgacggtgaggcactcgcccaccgtgtcgctgcggcactccctccggcccacggaggagaggaagaagtccaggtccacggcaatgttcatgtcgggcttcatcgccgccggctgctccggcgccgccgtcagcacgcggggttcgtcgaccacgccggtcgatgtcgatggggggggcctccacgccgcggcttgccctgcttccctcgtgcgccggggtaggtgccaccttcttgctggcgtact

SEQ ID NO: 460354 - DNA, 442 bp, Sorghum bicolor
cgtccgaaagaatgcggtacatggctgcggatatggaagatgcaggtttcggcaactcttccagctcacatgactgtagcaggagatctgacccccatagcattgcagtggacatcaacaaagcttttccagatggaactaacttggctttggtgcaaaaagacttggctacacagtctgcggagattgagaaacagcgcatggaaattgaagttgaggcattggagcttgcaaagcaacgtctcaagtgggagatatttagtaagaagaaggacagagagctagaaaagatgaggttggaaaatgaacagatgaagatggagaatagacgtttggagctagaggtaagagacaaggagttggagcttgaacgcaagttacaaggcagtggcagtcatgcaatgacatgataacatctttgaaattgcgaagattgaaatgc

SEQ ID NO: 460355 - DNA, 217 bp, Sorghum bicolor
cgtacgcacacatttactacatggctcatgggaagctgcaattagcactgcctttggaaaaggagcaagaggggagccagatatctgtcatgagaactgtggacagcaggatgaggaaagaaagagatgaggacaggaggaggatataggatctagcggaaaacggcctgtctgaataccacatggttgctcgatggtagtcgaggttataggtgat

SEQ ID NO: 460356 - DNA, 399 bp, Sorghum bicolor
cgtccgcgccctcgccatcttcatgttctggaggttccagatgcgccagctcgccggcaacatgaacaagaagatcagatagtaccaatgcaatgtctccttcactcctttgattttgaagaatctatagtcaattgcctttgttatgccgcagttggtgtagctagatacttgtggattagacacgttacttctgtgatctttttatttgataggaaccaatctttctaagtagccactggaccttgaaattttcacattgtcatggaaaagggcaatttgcaatgatggtgaattggacttgtgattcaataaaccgatattggtttggttttaaaaccaaaaccaacaagttggttttgtcgatcccttatcaacaaattacgacttgtccctcgg

SEQ ID NO: 460357 - DNA, 420 bp, Sorghum bicolor
  unsure (1)..(420): unsure at all n locations
cgtccggtcgagggcatcatcaaggtctccgtccactacgacatctcctacttcacaccggccaagctccatgaggaagtggagatggacgggcgggtggtcgagcagaaagggcggatgacagcggtgacggtggagatccggaagaaggagtccggcgagctggtggccatcgggagacagtggatgacggcctccaggcccaaaggctctcagagcaagatctgaagcttcctttaaatttaatcagtagcttgaaaattaatcagcaagatctgaagcttcgttgaaaattcagttccagatgttactggtgttgatgtcccctgtaatttaatcatgcattggcaagcaagatggaaattttcatctcanaaaaaaaaaaaaaaaaataaaaaaaaataaaaataaccctaaaat

SEQ ID NO: 460358 - DNA, 421 bp, Sorghum bicolor
cgtccgcacacattgtttacattgctcatgggaagctgcaattagcactgcctttggaaaaggtgaaagaaatgagccagttatctctcatgagaactgtggagagctggttgaggaaagaaagagatgaggacaggaggaggagaaaggagcgaaaggagaaaggcctcccagaattcgacatggttgccgagggtagtcgggttataggtgatccagcaaagagcgcagccagagttgtaaacaacgggtgggcagcaggacggctcacctcgacgatcgcaggagaggagaattttgttttcagctcgaacagcgttcttaagcaatgatcttgtttgtagtttgcttttcatttattgaaaatggtaaataacaatcttgcagatccaatagatacaccattggagctttggcattt

SEQ ID NO: 460359 - DNA, 481 bp, Sorghum bicolor
  unsure (1)..(481): unsure at all n locations
cgtccgatcttgtaatcggcgtgggggggcattaacgtgcgaaagcgaggctgccggtgtggatggacggagagcgcccccgccacgccgcggccgaggtggacgacggcgaaatcgtagcgggcgcgtgatcctcgaccacgactgccggggcttcatcagtgtcccagtggcgccgcattgctgtccgcaaattaagtgcggctggtgtatgattgggatcgccggcaaatcgcctacccgcacacaccgaccatgtcggaggtaggatgccaatgcatatacctgagttttttttacacatctgtcattaaaagcttcaatttctagaatctgtataaaatatcttataaaaatatatnttataataaatctaatagtactaatttggtactataaatttatcatntttttagaaaatcaggcaaagtttaaattttttgacttaagataactctagaaattgaagcttgaacagagg

SEQ ID NO: 460360 - DNA, 109 bp, Sorghum bicolor
gggtcgacccacgcgtccgcccacgcgtccgcccacgcgtccgcggacgcgtgggaaaaaaaaaaaaaaaaaaaaaaaaaaaagaaaggggataaaaaaaaaagtgggt

SEQ ID NO: 460361 - DNA, 74 bp, Sorghum bicolor
gagaaacaaagctgacaacgacgatatgatgccgcagctgcgtagccttgtcgcgcctgctcctagtggccacg

SEQ ID NO: 460362 - DNA, 460 bp, Sorghum bicolor
cgtccgtgactgcccgtgcgtatgtgcgtgactacagacctatcgagaaggggcgacctctccagaagcggacagcgcgggcagcactgcttcaggtgccgtcaccaggggcgaccgcgacggcgatgggcgcgaccggcgcgccacggacgacctcctgcttgtgtatatctctgcctttccctcaagcgttggcggcggagcaccaggcgacggcgtgagctgcaggcggagcgacgatactggtctaaaacatctggaatagagattgcgcttacatgccttcttaggcacggctgctacccatgccggtacaccaacgaccgatcttgctgtgctgcatcgggaaactctttcacttatcctctatcaatttacagggactgggaggaggaagaggtccgtaaggtcagcagacgccagcagtcgccgctggaacatgaaacatggatttcagtca

SEQ ID NO: 460363 - DNA, 316 bp, Sorghum bicolor
  unsure (1)..(316): unsure at all n locations
cgtccgctgcatccatggcgtcggccagcgcagcggacggcggcgacgaccccgacgactggcccgggcggatgcgggtcagaggtcaatggggaataacaacgggaaagcaaccattgaggaacgttagttatgacgtaatatgcaagagcacacgcatggtgcgtgcgaggacggccacctctatacacatatcgagtacgttcggagtgagtataaccgncgacttgatactcagataagatactgtgttaccagtctgcatgagagcatgtgagatganatactatagtaataattactggcagatgatatg

SEQ ID NO: 460364 - DNA, 208 bp, Sorghum bicolor
cgttacgcaatacaatacgtcctcctcgcgccccccacttcgccggtagcccggccgacggcatgcctcgagcatcgcgcccaggcgggacgcgccactggggcgttaccatggctccactgcacaaacccgaggcagagccaccgcacgggatccgagtcccaccctccaccgaggccaggatgcgtgcagcgcaagggcaacagct

SEQ ID NO: 460365 - DNA, 245 bp, Sorghum bicolor
cgtacgcgagcggatgggtagccggcggtggcggagatcctacaaggccggcgcatccctagcgcgatgccaaaggtgatcgcgcggaactgatacgactccattgtgccggaggccgcaagcttcaaccggagcagcatcagggtcatcggagccgacacggagctcatggcggccaacttccggtccttgctcgccgagctgaggaagctcaacgggaccaagcagtacaagctgtgcaagtg

SEQ ID NO: 460366 - DNA, 393 bp, Sorghum bicolor
cgtccgaaaaaaaatcatcacaaatactctgaaattgacatttgtatgttgtgaacgaaaaaatgcaattcttagtctttatataagacagccaagtaataccaaaataataattaaatcgctacagcagtaaactaaaaattattatttttttaagttataaataataaaacgatcaaaatgagtggatatcatcaagaagtatcaacaaacattgaaaacagccgaaactcactacggcgcatcgcaacaaacgatgatacagaattctcccgcgaaagtatcgtgaatttaatggagaaattcgtcaaaactgtgaatgttatggatgaaacgatactggtaccatgccgattgatggatagaacggttggcgatgcaactgatacagta

SEQ ID NO: 460367 - DNA, 460 bp, Sorghum bicolor
cgtccgctgaaggacctggagaacttgtgccaaaagtggcaattgaatcctccaagcaaactgatcgtagactttgtccatgggattgagttgacacagggcctagggagcccactggaggcacttgggctattcatgaagaaagatattgaggaagaggtcgaacatgaaatggaggacagcgtgtcaacctcccagaatgctgatgtcgaggaaggagagatcagctgctgtcagtagtgtacctctcattctatgattatgtgcgtgctatgtaactattccaccactgtgcaacctcataagtgagagtaaaagaagtgtgacttcatgcatgttgtctgctctgtcatctaacctagctgcaccagaatgtctagagtacaataattgggcattggcgcattgctgccggttttgtggttgtcatgtgatgtgctaatgtatgttgtaggtgttc

SEQ ID NO: 460368 - DNA, 342 bp, Sorghum bicolor
cgtccgggccgaggtcataatcgatgcacggaggaggatgccgccgcagctgaagcgattgagaatataaaagcaggcggagaccgccggccccctctggcctcgctgctcccccggtcctccctcacatgccctgccctcgcccggccctgccctgctgcgcccaaagctgaatctgcccgtaatcaattagagtagctgcattggcgggggagaaagcgcgagaagcgcatcaacaatggcggagcatgcgagcgccggaaggtactggtgccacatgtgcgcagcggtcgtgagccccgtggagggcgaggcggagatgaagtgcccgctcttgcacag

SEQ ID NO: 460369 - DNA, 121 bp, Sorghum bicolor
tccgaattcccggtcgaccacgcgtccgaaaaaaaaaaaaaaaaaaaaaaaaaaaaaaaaaaaataaaaaaaaaaaaaaaaaaaaaaaaggaaaggtggaaattttgtttatgggggggtc

SEQ ID NO: 460370 - DNA, 311 bp, Sorghum bicolor
cgtccggactcgctggagatcgctagcggccaatctggcggggccacgctggcgaactcgtgcttgcgactgaggagctgttctatatatcaaccaatactaaattcactggtctcctttgtactgcggagagcctggaagcaccgtgtggctgccgaactgaatgatggtgacactcatcgctttgttggcagctagcatgttaccaagtaggactgagccgatctggcttacaaacagatgggtatactgactggtgtttgggactcgctctgtaacagcgcattaatcgcaggggatgtggtggacac

SEQ ID NO: 460371 - DNA, 425 bp, Sorghum bicolor
cgtccggtaggagttgagattaccttcccagtgtactcacccaggatcaaggagatcacggtaatcaggcacaggaaagtgaggagagcaaagttgtactacctgaaagacaagcttccccgcttttcaaccttcaagtgacatcagatctgctgacagaacatcttcttccaccaccatttcgatttctcttagaaaacctttttttcacttccctgtccaaatcagcgcatttcactgtaattctcagatatcagatgtgtaatgtctactacagctttataacatatactacttggcttgcaatgcaatgcttctttgtcgtcttgtacaaaattcgtacaaaggccttgttattatgaatttaattgcatccttttatgaggatcgacaagaatggcgaagcgacctgcacgcaatacatg

SEQ ID NO: 460372 - DNA, 470 bp, Sorghum bicolor
cgtccggattaccgcggatatctggaaagtcatattctattgagatgtcaggaaatgtaattgatgaagcaactgggaaaaaactacgcagtcttggaaaacttgctcccacgattgagaagttgaagcgtggctttggcatgcacgtccctgaagagtttagataactggttctagtacaggtcttggctttgctaatagtacactcttcaaagattaccatggggtgcaaacctatgatttctgcggattgtggtattaaatatcagatttctctgaattggactggagctctacaagcaatacttaagatccttggtgtgaagcgaagggtggcactcaagaagccaagataatgtggtctaatgccttaactaccaatagtatccctcctgctaattccattactttaatggaaagcacgtttgctagtgactctagtctatcaggcagttcttaacttcactgct

SEQ ID NO: 460373 - DNA, 284 bp, Sorghum bicolor
cgtccgaaaaaaaaaaaaaaaaaaaaaaaaaaaaaaaaaaaaaaaagggcggacactataggggatgggagtttactgatgcaagcaaacaaaaaaaatggctcttctgttgggcgacctagatttacattcactggcctccggtttataccgctgtatagtgggtaaaccgtgtcgcatcctaacttaattgggtcgcaccgcatccacctttagcgacctggcttcctaccgttgagcccccttaaaggcgtatgggacaccccctgttacggcgcattaag

SEQ ID NO: 460374 - DNA, 376 bp, Sorghum bicolor
  unsure (1)..(376): unsure at all n locations
cgtccgccgactccgcctccgcggcggggggcgaatcgcgcaaccggaggccgtcgtggcacccgggcctgcctccgggttcaccggttccgcctcaggaatagagggactagtgaccgagggcgatctgaggcagcttgtgggcagtctgggcttgagcgcgcgtgagccagagacgcacggctgggagcacagtcatctncaagagcaacgacgacgtcttctacaacgcctggtgcgacaagcccacggctggccctcctaaatatctgagtattacaacatacgagagatgctctactgtgcagttgagggacttgtacatggataatgagtacagaatggagtgggataacactgttacaaaacatgagca

SEQ ID NO: 460375 - DNA, 409 bp, Sorghum bicolor
cgtccgacaaactacaactacgaagaggagggcgaatgggccgacgctcgggatgtaccacactacgcgcagcgctccggctacaccgtatccgctctcatgaatagaccgactagtgacggacggccatctgtggcacatcgtgggcactctgaactcgatcgcgcgtcacccataaactcagggctgggagcacgccattttcaacagcagcgacaacagtctactacgacgcctgctgcgacacgtccacacatgtgcctactatgtatgtgaataggaccacacactagagatgctcatctgagccgtcgagggacttgtacacgcacaatgagtacagaacgagttgcgataacactgtcacaaaacatgagcatttgtagcatgactataacagcacggtgga

SEQ ID NO: 460376 - DNA, 456 bp, Sorghum bicolor
  unsure (1)..(456): unsure at all n locations
cgtccggcggcggcgggggcggtagcggtcgcggcaggctcaaggggcagctgagctcctggtcgcggcaggggtcgctgatgtctcagatctcggagatggacagccaggagatcggagggagcagccccgacgctgctgccggcggcaggggcgggtacatcccggggtatccgaagagctccgtcgggtgggacgactcgtcgtaagcgctcatgtccgacagcctgtccgggatgaaacgcccgctggactcgtcagagcctgccggccagcaccagcaacaacagccgaacggtggtggagggccggcgcaccagttcagtctgcccaagacgtcgttagagatggctgccatcgagaagttccttcagtttcaggacgccgtgccctgcaagatccgngccaaagcgcgagtgcgccacgcacccacgcatcatattcaagcggttgagg

SEQ ID NO: 460377 - DNA, 477 bp, Sorghum bicolor
cgtccgataggacctgggctttgtgaacctgatgaggatgacactggaatagagattgtgataacagttcttcttccttctcggctcagtctgcctaggtgcatttacacacaagggggtgggaattgcacaatcctatcgattttagagtgagacacagcatgcatgcgttacccacctccatgcaggtcggaaatttctgcacattcctatagtagtaccattaaggcttgcacctcacatcaaaagccaacagacgtgatattctgaccactgatgcagagctgccttcaactgatggtgctccatagcttagcttatccgtggcgaaatccaccagacatgtaagcagacatgagatatatagggaagtcttttgtatatgtgcaatcacctaagcgtttggtgataaacgaacctctggctaaataatcaattggatatgattgtgaacataacatggttgcgaaccatgag

SEQ ID NO: 460378 - DNA, 331 bp, Sorghum bicolor
cgtccggtgccatacgcctctatcagcaccaataatgcctgttgcaaccacgtctcgagctccattaccaaagaaaatgaagatcgcggcggtgctcttcacgttggtcctagcactcatcaggtggagccgctgccgacaggacggagacagaagacacttgcacaaatttctgtgcacaaaagaagctcaaggagccagcctgcatggagtcctgcgccctcaacaggcgctgtaaaaaggtgtggatcgaggctgtccaaggctgggtgaaatgcaacatgaagcacggttttggctctgcaaacttcaagtcttgcgacgaaggatg

SEQ ID NO: 460379 - DNA, 458 bp, Sorghum bicolor
cgtccgggcggcgcggggaaagtgagctacgaccactgcgtggcgtcgctggcgtcggacgcgcggagccgcgacgccgcggatctgcaccacctggccgcgctggccgcgcggatcgcggtggagcacgcggcggcgacggaggccaagatcgaggacctgggcgaggtggaggagagcccccacgcgcgcgcgcgcctgcaccactgcctggacctctacaacgccgacgacgacgttctgcgcgacgcgctcgacaacctacacgcccgcgtatacggcaaggcgtcccagcagctggccagcgcgctgggcgccggcgagagctgctaggacgtctggaagggctaggagcacgtccccgtcggcgcgcacgacagggagtacgggcgcatggcagttggtcgcgctcggccttaccagcggaatcgcttgatcgcgcctactacgctaatgct

SEQ ID NO: 460380 - DNA, 426 bp, Sorghum bicolor
cgtccgtgggatgaaagacaacaagctaggacaatagatgttgagttcttatcaaccactttgcttgcacaattcttcttcgaaacatgataacctgttgtcagcaaataggatgcacgaagatcagctttttttgcctagctacactactgatccaagagtctattgcgttcccataccatgtgtctgatgagtcattatcagagccatgtcaatgtaaaagcttcattgatcagggcccttctcatggtacaacatggtggctgtttttggggaatgcgtctatggatttatgccagtgcgaagtggggtcggcaaggtcttcaggatgggatatggattgttgtaaatgatccttatagcaacaaatatgatgatgtgaaattgcctgataagaaacctgctagttcactcttcctattcacg

SEQ ID NO: 460381 - DNA, 186 bp, Sorghum bicolor
cgtccgtttgtattatgaaaggaattctgcttaccattttggagatttcccctatgtagattagttcgccattcgtcagtgctttgttgtgattatatagtcaaatatgagtaaaggatccaatattttttttctaagtcttcaatttctaaaagaaacaaacaacactaatatgaacatataagg

SEQ ID NO: 460382 - DNA, 442 bp, Sorghum bicolor
cgtccgaatctccccgcccctcgcactgcgtaagtatggagctggacaagaggggggaggaggatctagaccggaccagctgctcaggcatgttctggagcagaagaagctgccacagggagcagcagtgtgatgcagagatcaacgcttgattctttatttgtggttgtgaatatgtttgaatatgcgggagatgagcagcggttgtttttcctccccagctgtgttcctttctctcttatttacagccaatattttctttgattggtgaaatcctgctgcagccctttgcagccgtagcgtgtgtactgtaaacagttttgttacgatgggtcgtgtacctgtgaatctagatagcttcaaaggcgctagccagttactggtctttgtagctgtatgtaaattgcagatctggatggaaatactttctggttctgatgat

SEQ ID NO: 460383 - DNA, 396 bp, Sorghum bicolor
cgtccggatagacgcgagggccgccctgtgtttgtatggagctggacaagacgcagcaggaggatctaatcgggcctacttgaatatgcgaggaacagagcttatttagtgcataaggggggatcggtgagctgcatatatccacgctagaaactcattgcggggttatgaacatggacatctactctggaaacatgcctgatactgtacacaaatacacacatgttcactcatatattacaaacggacacacatttcctttgaatgagagcgccttaagatttgcatgctttagctgcttatcaacacacgggaacagcttgactgcaatgcatgtagagcgcagaatattggctaaaaaagaagaatctcaccttcacttgtatgaagatgatc

SEQ ID NO: 460384 - DNA, 96 bp, Sorghum bicolor
acgttcggtattgcttatgtattggagaaatcatacatgatcttccatgaaaaaaaaaaaaagggatgggcggtttgtgggggtcttaactttttt

SEQ ID NO: 460385 - DNA, 429 bp, Sorghum bicolor
cgtccgccttcttcaccgacttcggccgcgccatggagaagctcagcttgtacggcgtcaagacaggcgccgacggcgaggtcaggcggcgctgcgacgcctacaacagcggacccgccatccccggcgccctcggcggcggcggcgccatgcccatgcccatgcccaagatgtaacgctgcgcgtgctacgacgacggcgcgcgcacgcgcttgtctgccgatctcgatagacggcggccgagctgtgtggcacgacgacgacgcgttgctcgaggacctctctgctcctcctgcggcggtcacgatggtgttaacattttgtgcggaaatgtaatatgtttcctgctcgatcaagtaatttatccctaatctgtgtgaagtgttgctaattgctagtataaattaattggttttttttggtcaaaaa

SEQ ID NO: 460386 - DNA, 419 bp, Sorghum bicolor
cgtccgcgtcgtcccgttgtccacactagcttgtttgttcttacggccatggattatcggaggaagcccgcggtgtgccgtgcccttcttgtgctgctcatcgttgcctccagcgcggcggtgtcgatgtcgactgcgggctacgacgagaaatgctggaaggacgacgaccaccaccctatctgcgtaagcagtgactgcaaggagacctgcctggatcacggccacgtggacggccgatgctcctggcaatggtcatggaggccgtattgccagtgcctgttggcggactgccaatagacgggggaaaagctgcgtcgcatgcatggcgtcctggttgcctcgccggccgtcacgacgccgcgacgacgtgccgccgcctgatccgatcgatctgtgcgtcgacgtacgtacgtgtc

SEQ ID NO: 460387 - DNA, 451 bp, Sorghum bicolor
  unsure (1)..(451): unsure at all n locations
cgtccgctctgcatctgttgtttctcatgcaattgtcgacatttttggcaaacagggctccctcgacagttctaaggccgagagctttgtgaagaatctccaaatggagggcagatatctgagggatgtgtggtaaaaagcgattgtgaaatatgaaaaaaaaatggtattcaggggataaacactcattcgcattacacatgtgtacaactattaccggaagagtactgacaatggcctagatctgatatttttattggttctgtatttatttttattttctctcattttctttcgcttttgaggttctcccaagggccttttggtttcttttgtctttgaagttctctcaagagttttttgtacctatgtattataaattctttatatatatatgtataagatgaggacaantttggcaataagcctcactgtgttattagtactattg

SEQ ID NO: 460388 - DNA, 388 bp, Sorghum bicolor
cgtccgaaaaaaaaaaaaaaaaaaaaaaaaaaaaaaaaaaaaaaaaaaaaaaaaaaaaaaaagaaagaaaaaaaaaaaaacaaaaaggcccacccataaaaaaaaaaaaaaactaactggggcggcccttttaagggatccaactttccttccgcttccatccaaggaaaatagctgttccttggggttcccaaaactaaattggctggcccctgttttacctctctttatctggaaaaacccggacgttccccacttcaatcgccttgaaaaacatccccctttccccaatgggctttatcacaaatgggcccgcccagcttgcctttccaaaaagttgcccaccccgaatggaaaatcggcccccctctttagcgccccattaacc

SEQ ID NO: 460389 - DNA, 125 bp, Sorghum bicolor
gcgctccggtaccgagattcgcaggtgtcggcgcagacgcacgcgttacagtgctctctttgtaggcctgcggaaccagatgtgcacatatgcaaacaatggcccgcgggcgtatagactattcg

SEQ ID NO: 460390 - DNA, 180 bp, Sorghum bicolor
cgtccggcatgaaggcacccacatttacagtttaattcagttttgtatctacacacccaaagggaaaactccgcgaggcttgtacaccaggagctacgtcttactgtgccttgacatctttctggtgatgctataagtgggacctgaggatgacatgccgtgggaagaacatgtttatat

SEQ ID NO: 460391 - DNA, 280 bp, Sorghum bicolor
  unsure (1)..(280): unsure at all n locations
cgtccgcaaatccccaaaccctagcggacgcgcgcacgcacgcggcaccatggcggcggcggcggcgcagcagaagatccggtggggggagctagaggaggacgaccgaagggacctcgacttcctcctcccgccgcgggtcgtggtcgggcccgaccagaacgggctcaagaaggtgatcgagtaccgcttcgacgacgacggcaacaaggtcagggtcaccaccaccacccgngttcgcaagctcgcgcgggcgcgcctnttccgcagcgacattgag

SEQ ID NO: 460392 - DNA, 377 bp, Sorghum bicolor
cgtccggtgtgctgctgcatgcatattgcagctggtggatcggaggacggacgcgcgtggaactgtggtcatcccaacacgtgagggcggtaatgctattcgccatgacagttaagcgtgtaagtacggcgctgatcgtcgatcttcctagctcgctggcgtgacagaaacatataccctcagaacggtcgggtgactgcatgtctgcatgcagcacacaagagcagcggcaagcagcggaagaacggctagtgcatactgtagtcaagactcaacgcaacaactgtcatgaggtgaaggcaactctcatgaggtaaaagtgtaacacgtcaatgtggcttcaaatcaaaatacttgaatcctacaatcttagcatc

SEQ ID NO: 460393 - DNA, 446 bp, Sorghum bicolor
cgtccgggcaggctccctccctccttagctctccctcgacgtcgagctcgcaaatccggctaccccctccctccctctccactcagatccggtgtaggtacagcgagctccctctcccttggtggcgcgtggctataagtgtgcgagcgggcagatccggcggctgcttccctccctttctccctctccgctcagatccggcgcaggtatggcgagctccctccctccctctcgctcggcagcatgtgcgggctcagatctagcgcacgtatggtgagctccctccctctccctcggcagcgtgcatgggcggccacatccggtagcaaccccttgcttcggccagcgctacgatggtggacacgatctagcgcagtggattcccccaagtgtggtttgctcagtttgccgatttgtctgggatgcttaattgcctagtggtcata

SEQ ID NO: 460394 - DNA, 448 bp, Sorghum bicolor
cgtccgcccacgcgtccggttcgttcctgttcgttatgaattttttcccgttcggtcgtcttcatcatatggcgtcgcgtcggcatcgtcgatctagctaggatccatgcacgcctcccgaaggcaggctatagctggattcttaattaccaaggttcctcatgatcagttgcctttcttcctcaagagttagagccaaataaatgcaagacagaaggagtggtaggaaatggggacagatactcatcatatggatcagtgtaacacagagaaattaatggtgggaaggtggagagatgggggtagtagaggtagacagaaacagcagagagaagcatgcatggcagcgcaggaggggagcagcaaatggtgaagtaagatagagaaacaaaatgcatgcaaatagcttattgcactttgcaggagggagcagcaggcatgatgaata

SEQ ID NO: 460395 - DNA, 265 bp, Sorghum bicolor
actaatttaatataaaaaaaaaaaaaaaaaaggagcgcgccgttcaagaaagaaccaagcttacattccctagcatgccacgaactggtgtacagtatagaagaggttagatataatccaatggccttggacttacaatgggctgtgtgtcaaacccgcgaacaaaagcaaataattcgcctggactcaaacctccgaattcgacaacagacgtgatgctaaaacgacgggacccaaaaggcaatagcaccactcttgcaaaccc

SEQ ID NO: 460396 - DNA, 434 bp, Sorghum bicolor
cgtccggtcccaaagattgctgacagaagccgagaaggtgatatctttcctgctgcatcacttgatgaatacgccgaacaagctagagagcaagaagaggaagactcagatgaagaggctggagattttgtggaagattaagttgggaatgctttatgctgtaaacatactttcttggtgtaatgagatggtgcttttgcggtcttaaaaaaaaaatcaaaaaaaaaacaaaagagaaaataggggaaggccaacataaaacgaggtgaagggactcaatggacacccaaagaaaatatcaaactaaaagggggggcccacgcaacaacgcgggaacgtggggccctaggtgccgccattacgtccgggccgttttggtgggccaggttgggcgccatcattcacagcggttggttggtgggttcggatcggat

SEQ ID NO: 460397 - DNA, 444 bp, Sorghum bicolor
cgtccgcggacgcgtgggcgagcaaccgggaaccgaagcggcacgtcatggcggccgaggggtcagaccctacctccccggcgtcagcgccgccgccgccgccgccaccgaagcggcgaaagatcgagccgcccaggaggaccaggccgtctcaagttaccccagataaggacaactcggtagcatcttccaactcatcgccgattccgggttcgctgcctgcgagagttgatctcaacaaagttagagaggcaaagcgatttgccgtccttcaagcgcagcacgaggggtgccttggaagctataaaagcttcgattccctctttgggaattaccttgttcctgtcgtcccaacgaacgacttctttgatcaggtcgggaccaaaccatgaacaagagccaaaccatgaacaagaatggcaatttgtgagtaccgaacaggac

SEQ ID NO: 460398 - DNA, 419 bp, Sorghum bicolor
cgtccgaaaaaaaaaaaaaaaaaaaaaaaaaaaaaaaaaaaaaaaaaaaaaaaaaaaaaaaaaaaaaaaaaaaaaaaaaaaaaaaaaaaaaaaaaaaaaaaaaaaaaaaaaaaaaaaatatacaaaggggggggcctttttaggggtccaagtttttctaccgcggtgttgcgaggttttactttttttttgggggcacataattgaatttccctggcctattttttcaactggggaattgggaaaaccctgggtgttcccaatttaattggcttggcaacaattccccttttcgcatgttgcgtaatttgcaaaggggccgggcccattcgcctttccaaccattttcccccctaaatgggaaattggtccccccctttaccggtccctttaaccgcgttggtgggggggtttccccc

SEQ ID NO: 460399 - DNA, 60 bp, Sorghum bicolor
cgtccgtttttttttttttttttttttttttttttatttttatattgtgagcggtctttt

SEQ ID NO: 460400 - DNA, 60 bp, Sorghum bicolor
cgtccggcaaggcacttccatggtactactagcataccatattatggcttctctggatcc

SEQ ID NO: 460401 - DNA, 442 bp, Sorghum bicolor
cgtccggttagacgttctgcttttaaaatcacattgagatacctaaatttacttctcaaattgctggcagctctagctcatatgagatacactgatttagctgtacctcacgtttggcccatttgatcagcaaggtcacttcttgctggtaattgggttctgttcaacagcatgggcattttgataagttcttgctttatgaaatcctcacttggtaccctaatactaaagaatgcataggacaaatgtttgaatggttctgatgaataatgtggttctgaataacaaaaattaaatggcaatagcatatgcttcttaggctgtttatatctatcatctgttctaaaaccatgtgttttgtttcagacaatattcttatgttttttcccaccatatatatactgagcaataatgtttggttttcctaattgccatatgctag

SEQ ID NO: 460402 - DNA, 338 bp, Sorghum bicolor
cgtccgaacacacatagttgagcatacacagaagactagagataatacgatagaggtaattatgtaaaacatagattccaaaagattttattcttccatcataaaggattcttttttttttgcagcatctttgtcgcagcacaagaggcacaatgttgttgaaacctagcatacaatgaataagaagttagatagactaatgcttggtagtggatcgggttaatagcctactaaacattgactgaatgtattgacataatgagttagtaaataagtaactactgtacctatttgtgactcttagatggagtggctttgcagatatcatcccttgtttt

SEQ ID NO: 460403 - DNA, 448 bp, Sorghum bicolor
cgtccgcaaagctattagaaatgaggtcaatgatgttaaagatgacctgtctcaaattggatttgatatcgaatcgattcagaaaatggttgctggattggagggaaagatcgagttacttgagaacaaacaggacgtggctaatactggtatatggtacctctgccaagtagcaggtggtttaaaagatggaataaacgccaagtttttccaggaaaccggtgagaagctgaaactctcacattcagctcaacccgaaaacaagccagtgaagggacttgaatttttttcggaaagcaccaaggaacaggaagtagttgactccaaaccaattgcggtcacaatcgacgctaagaagcctgagaaaaccacagctgtaaagggcaccgcagtgcacaggtccatcaggttctcatatcggaaggaaggccttgcattgtgatcaaat

SEQ ID NO: 460404 - DNA, 447 bp, Sorghum bicolor
cgtccggtcggtcttccccacccgtcctccagctcgaaggaaaggccggagaaccctaaccgagggcgagcgccgccgccaccgtggtcgagggtcaggcaggcgagggtgggcgcaggcgggccgcaggccgtaggcgcgcaggttttcttggcgacgagcgcaggcccgggcgcagccaggcggcctcggcggcgcgcaggcgagcaggcggccttggcctcgtttgcaggcgggctaggcggatggaggacgacgacggaagaggtcactgatgccgaccctgaagagatccatgttatccatgatccagagaaccccaagattgtgaagggagaattgtttcctgatattgtatcattcaggaaatctattaggcaccatgctgtgaagaaagggtttgtgttgacgggtataaaaacagacaaaacatggtttcttgcaaag

SEQ ID NO: 460405 - DNA, 397 bp, Sorghum bicolor
aacactaggagttatcgttctgcttggagcgaagaggggggagctcggtcagctgtggaacgccaaggcgtaacctatctgggaggctcatagctgatatgatggcactggttgcaggcttcaaatgggctttggtttaggtagacttgtgctcacgtatctgatcggcttttggtgaaattatgccaatcataagcatgatccatggttaggagatttctttggttgagcgcgaaacacacacgaagggtggttaaattatactagcctgctgcacagcacaatgcatgtcaaagtcagtagcgtgatgtaaatttgagcaaaattagacgatatctgttcctgtcttcctgacatgtttgattacaggcaatgtaaacgtcctatagtcattcag

SEQ ID NO: 460406 - DNA, 430 bp, Sorghum bicolor
cgtccgcccacgcgtccgccgttcaacccatcagaatatcatggacacagcagttggccgtccttagaaggatcttccatagctggaactaatggattcaactcaatggctgttcatccagaatcagtacagcgtgggaactatacatttccatccaatcacattggccattcatggatgccccatgctactaatggtattgctgatggagttccccagtgggaatatgttaatgcaactactaatattcaaggcagatttgcccattcaggagccacagaaattgcaaatggaggctttcaggaatatcagaatggcccttcaactgtttctcggggaccagtaccttatttccaccagcatgcgatgcatggcatgcaagctcataatctgcttgatcctactcaaatgcaagttccttaccaacaat

SEQ ID NO: 460407 - DNA, 429 bp, Sorghum bicolor
  unsure (1)..(429): unsure at all n locations
cgtccgctttctcatccctccagttcggagtccacagaggagagagagagatgaaggagggatcgtcgtcggggggaggggcgttcgctgggggcagcgatccgaggcagccgtcgacggcgaagccgtacgcgccgccgaagctgtcaccccaggacctgcccatcgactatgcgggcttcctcgccgncgtcttcggcgtcgtcggagtcatgctccgctacaaggtgtgctcgtggatcgcgatcatcttctgtgcacagtcgttggcaaacatgaagaacttcgagaatgatctgaaacagctctccatggccttcatgtttgctgttatgggtctggtgacgaactattttggcccctctcgttcaggcagcacaaagcgctaatctgtgtgagaacaccatgtgcctcatccttcataggata

SEQ ID NO: 460408 - DNA, 454 bp, Sorghum bicolor
cgtccgcatgttctacgtccacgaggcggacgtcgtccagatccaccatttcctcgaggagtgctccctctgcgccaagtcgctctccggcgacatcttcataggtgacacgccgttctgcagcgaggagtgcatgcagcagcagatcgaggtggacagggcgaagcaccaccaccaccaccatgaccaccatcaccatcagcaaccgcagccgcggaaggccggcatggacgccaaccaccacccgtgggtggacgccgggttcgcgagggcgcccgcgctgcgcgtctgaaacaaaaaggaacccgcgccgccgcacgcacacttaccccgctccgcgcgcaggcctggggacatcctcacatccatcctttctccgcgggtttctgacgcgggctggagcaggacgaatcctttgggttttaagggatcggctgcatgcatgcctgcacta

SEQ ID NO: 460409 - DNA, 167 bp, Sorghum bicolor
atttcgcaagtcccaggtggacgtacgcatacgtcttaacctccaaccgtccatcctaaagaatccaagtttccttcccctccataccagggcataacctctgttttagggggacctaattccattcaactgcctgtggtttaccacctcgtgaacgggaaaaccct

SEQ ID NO: 460410 - DNA, 295 bp, Sorghum bicolor
cgtccgactacgcgtacatcctgagcctaagttctcatatataacatgacgacatacgcccacatgcggggtggtccataacttatatagcatgccagactgaattctctatgcctctaccgacaacctccagacttgcttgcccctggcgcctgctacttctagtgcgatgcaacatatccgcactgccagagccggagccttaccttatatgccttctcctggaactgttccaagcactggagagctgtgtacgtctacctagaggcccatctcttgcttgcattaagcccgg

SEQ ID NO: 460411 - DNA, 293 bp, Sorghum bicolor
cgtccgattaaggatagatacccagctgccgatcatagaggatacaacattacgtgcggcatcttgcgacgtgattgaccctgtctagcgtgaccagtacaactttgaataggctctaattaacgctaggaggactgggtctaacccaaggggcatgcatatgtcacgtgtagcaaactatcaccaccataggctgttatccacataacgaacaggcaagcaccgcatgacgttcacatcagttcagcagtctaaacgactattactgcgcacgatgccactgcatattgatc

SEQ ID NO: 460412 - DNA, 65 bp, Sorghum bicolor
gccctctttaaggatccaagcttacgtcttacaacataccacggtggcactgggtgcttggggtg

SEQ ID NO: 460413 - DNA, 426 bp, Sorghum bicolor
cgtccgtttgggtatgcacagcttgaccgatgttgttgctggaattggttttggaattgtcatgggtgcattctggttggctgtcgatgaccatgttgatgccttcattgtctctgggaaaaatgttgcaaccttctgggcaggcctttctctattgatgtgctttgcgtatccaaagccagaattccctactcctagctttgattaccacacagcattcaatggagtcgctttcggaattgtgtacgggatccaacaaacctacttccactttcacacccctgacgcccccctcatctttagcgctcagctgcccctttccacattcgccgggcgcatcctcatcgggatcccaaccatcctgatcgtgaaattctgcagcaaagcgctctccaagtggctgcttgccgtgatgtgcagcaccct

SEQ ID NO: 460414 - DNA, 306 bp, Sorghum bicolor
gctgtgtcctctgctctcccaaatcaattcactaccgccagcgccggatccaagaggagttggaggaagatgactgtgggcatgatcaacgcaaacccggtggtgcacgagcggccggagcgcgccgtgcacccccacgccgccgacgcgctcgacccgctcgatgtctttgatacggtgcgggatatcaaggacccggagcacccgtactccttggagcagctcagcgtgctgtcgcaggagtccgtctccgttgacgagaagctcggacgcatccagataaccttcaccccaaccgtgcagcac

SEQ ID NO: 460415 - DNA, 437 bp, Sorghum bicolor
cgtccgtactaatagctactcacaagcccatcagggacagacaacgcggaagcaagcgcacacgtacacctacacctacacctacctcggcgagcaaaggcaaaggctgatcggagagccatggccacggccacggccacggcggcgccccgccacgccgcgctcctcctgctcctgctggtcggtctccacgccacggccaccgtcgccgcgcgcgcgggcgccgcgcatgatgccgagctcacgtccaagccgtccccgggcactaagaagcccagcgtcaagccgcctggtaagcccagcgtcaagccgccgcccgtcggccccggcgcgggcgcggtgggcgtctgcggcgcgatcccgaccatcccgggcttcggcggcggcatccccgggatgggcatgggcggcggcgggttcggcagcatccccgggat

SEQ ID NO: 460416 - DNA, 431 bp, Sorghum bicolor
cgtccggactaagtgtgcatagattgcagcccatacaaatgcagcatgctgacaggccaacaaatgggtatgttgtctgtggctgatggattcatcaaagagcacagacttcagcaccatggagcactaaaagcatatggatgatagttcattattctgcagaaaaagatctcatgaacatgagacccagtttgcccttaacagaagcctaaatgagcgtaggatggctcatctgcagaacgaggaaggatacagtaaagcagatgttgcgtatgaaagtggccacacaaatggcacatgagtatgctgaacctcacacgaatggtggaggtagcaccaccagttcggagtcaggaagcatagtagatgcatagaagctatatttggaagaacaaaactgttcaagacaagcagttgaataccccagagaa

SEQ ID NO: 460417 - DNA, 322 bp, Sorghum bicolor
cgtccgagggcctaagaccttcactcagtgacatctgctggagcagccaatcagaggctccttcaggggttcagtcatcaccattgaagccatcctcttagtcgatcgtaatttaagtgcaatctcttcagagatgtggttgcaatccatcctctccctcctttttcttccctttctcaaagagctaggaccttgctcggttgagcatcaggctgtagggatctttgtgttcctttctgccagctttcttcttgtagtagcagttgttcagcatggaactcctgttcctttcaccaatagaagcacaatgatcagcactgtc

SEQ ID NO: 460418 - DNA, 368 bp, Sorghum bicolor
cgtccgcatgaaccttacagcttcaaggcgcttgttgatgtatcccgcacatcatttccagggaacaggcctgtcagaaaggagggtctagcagctatcctgtgaagcatattttccaatgtgtcactgaattcattatgggcttcccttccttgcaattcagagttactaatcctatctagtagcttgtattacgtggtgactcatgtaatttgcattactagtatttctgctattcccttctgctactacttttggaagacatgactgaactgaaacacctaattacacattattgttcttttgggccccgtcagttatgactgaactgagacacctaattacactagattgtgctttttgcccac

SEQ ID NO: 460419 - DNA, 488 bp, Sorghum bicolor
cgtccgcccacgcgtccggccgcggcgaccccgcgcctgacgcggccgtcgagaccgcggcggcagtgggaacggagcacgaggtggttgagaaggcgggcgccaggctcttcggcgtctccatcgggcggaaacgaatgcgggacgagagcaacggcggcgtgttcgaggactaccccgcgagccgcgcggcggaggtgaaggcggagccggtggaggccgcgcatcccgaccagcggcagcaggagaacaacgcgacggagccggtgccgcagtcgtggcccatttaccggcccaggcccgtgtaccacccgctccgggcctgcaacggctcgggcagcgccgggagcgaccacgacgggtccaccaactcgaggtgactcgagagcttgcaaagccaatcccgtccgtctcagtaaattattacacttactaatgctagtactttatgttactacaggttaaactagaatgagacctctaattag

SEQ ID NO: 460420 - DNA, 81 bp, Sorghum bicolor
cgtccgagaacaacagggacggagaaagtacaaatgtatctgttgtgatatatatatacattaatgatgcagttttcctat

SEQ ID NO: 460421 - DNA, 363 bp, Sorghum bicolor
cgtccgaaaaaaaaaaaaaaaaaaaaaaaaaaaaaaaaaaaaaaaaaaaaaaaaaaaaaaaaaaaaaaagaagggaaaaaaaaaaaaaaaaaaaaaaaaaaaaaaaaaaaaaaaaaaaaaaaaaaaaaaaaaaaaataaaatggggcgcccgttttaaaggacccaagtttacgcccccgtccttccaacttattaccttttttttggggcccccaaatttaaatcaactgcccgtgttttaaaaccggcggacctggaaaaccccgggcttaccccaattaattccctttgaaaaaaatccccttttaacaagttggcttaatacataaagggccggacccaatcccctttccaaaaatttc

SEQ ID NO: 460422 - DNA, 348 bp, Sorghum bicolor
cgtccgatgatgggaggcgtaaggtccttggccttcttcattatgattcaataggatggtgcttaagggaagagcttgagcggtggaaggcactataccagagagagaatttccagcagtcaacagttaatgggcactgaatatgtggaactgctgaaattttgttcgtgccttgtagccaagaagatacgaaatatataaagcgacattccgacaaaactaggattaacttagaacgcatctgtcaaagagtcccctcgtcaactgtaaagcctcgagtcttaccaatatatgcattttgtatcaaacatacacataagaggtttaagaggtgatgatccataaaaa

SEQ ID NO: 460423 - DNA, 308 bp, Sorghum bicolor
  unsure (1)..(308): unsure at all n locations
cgtccgaaaaaaaaaaaaaaaaaaaaaaaaaaaaaaaaaaaaaaaaaaaaaaaaaaaaaaaaaaaaaagaaggggaaaaaaaaaaaagaaaaaaaaaaaaaaaaaaaaaaaaaaaaaaggggcggccgtttttggggttccctgcttccttccccttgcttgcgggggtgtggtttttttttttgggccccttaattccatttccctggccgnctttttccatcttttggggctgggaaaccctttgctttccccacttttttccccttgcggcacttgcccttttcgcgggttggcctatttttttt

SEQ ID NO: 460424 - DNA, 66 bp, Sorghum bicolor
cgtccgaaaaaaaaaaaaaaaaaaaaaaaaaaaaaaaaaaaaaaaaaaaaataaaaaaatagaaaa

SEQ ID NO: 460425 - DNA, 455 bp, Sorghum bicolor
  unsure (1)..(455): unsure at all n locations
cgtccggtacgggcagttcgccgcggagcccgtcgcgttcgcgttcgccgggaacggcggcgtgggggtgacgctcggcctcccgcacggcgcggccggaggcagcgccgccgagcagaccgcgtcgttccttgtgggcaccaccacggccggcaccgacagcggcagccacggcgccggcgccggcggctacgacatgaacatgcagagcaccaagtcgttcgcggcgcagctcatgagggacttcgtggcctagctcgtaggacacgtagcatagcagtcgcccgtccacgcaaattaatcaatctctccatcgattaattgagtgagagcttggatagaaataaagggttgttcaagcctaaatatgctttgcatgtataaagcagttcagcttgggctataggtcttgggaatgtaaagatgggatatatatcatgggggcgangcatata

SEQ ID NO: 460426 - DNA, 398 bp, Sorghum bicolor
cgtccgcaagaagacccatctccaatctaaacttacagaggaggtaaaagaaaatacagtcctccatgcaaatttagaaaggcgaaaagaagcactacatgagcgtcgtgtagcacttgaaaaagaagtggaaaatttacgagatcagctgcagaaggagagaaatctgagggcttcattggaatctgggctaatgaatatgcggagaggacaagtgtcccttccgtcaacgatagacaccaagactaaggctgatcttgaggaagttgctgctgctgaagctgatattatgaacttgaagcaaaaggtttctgatcttcggggacaactcaacaaccaagtcccattgagttccacctcgttatgtgaatcatgcaacagcaagcgatccataaatg

SEQ ID NO: 460427 - DNA, 144 bp, Sorghum bicolor
cgtccgcggacgcgtgggcggacgcgtgggaaaaaaaaaaaaaaaaaaaaaaaaaaaaaaaaaaaaaaaaagaaaagggaaaaaataaaaaaaaaaaaaaaaaaaaaaaaaaaaataaaaaaagattaaaaaaaaaaaaatagg

SEQ ID NO: 460428 - DNA, 410 bp, Sorghum bicolor
cgtccgggctaagctggtgcaaaggtcaagtgcagcagcccagaagatgtgtggccctacagaagggaacaagcatacaggtctcagaagaccttcctcagcaggtgcgcgacggccctctactggagaccgacatgcaattgccaaggagaattcacaattgcctgcagttgtttccaccccacgacgaccttccactgctgagagacgcccagtcacccgagatcgtgcacagaaggaagccaatgtcaccacaccacgtcgaccttctacttctgaaagactccccgtcaaaagagaaaatgcagcgaagcataatgatatttccgctgtacgtcgaccctctacaggagagaggcgtgctattactagagatagtgttgtgagaacggatgtgaagacgcctagta

SEQ ID NO: 460429 - DNA, 379 bp, Sorghum bicolor
cgtccgcatagccatagctggtgttgttgcatataacaaccacaagctcaaggtaaaaccccaagcgaacccacagcaaggtgacgagaacaaggtcatctcaggaagcactcgagatgtggtattatcaatgaattcatcaaaagaagcttcgtaacaccaaaagtagtgagattttgaaacacttatatttttcacgaggagaattgggctctcttttgttgggttggccagctctccttggatacattctttttcctccccgcggatctggagggaagacattttgtacaatgatatgctcaagatgatacacttgccttcacagttgtaatattgctgctcaaaaaggtgggagcacgccatacagatgaaaatt

SEQ ID NO: 460430 - DNA, 487 bp, Sorghum bicolor
cgtccggcttcagtgcccaaagatggctaagtcccaggaaacccgactttcgttcacgtgacgaatatagtggcagagggcaaaaagagaagttcggcatggcgagagtggccagaattcgttgcacgcgcacgtagtatgtgcgctgccgaattcccgggaaacccgactttcgttcacgtgacgaatatagtgtccggggtcaaaaacagcagttcggcaaggcgtgagtgcccagaattcgtggcgcgcgcatgtggtctgtgcgctgccaaattctcgggaaacccgactttcgttcacgtgacgaatatagtggcagagggcaaaaccagccgttcggcacggcgtgagtgtccagaattcgtggcgcgcgcaggtggtctgtgcgctgccgaattcccgggaaacccgactttcgttcacgtgacgaatatagtggcagagggcaaaaagagaagttcggcatggcgagagtgcccagaat

SEQ ID NO: 460431 - DNA, 242 bp, Sorghum bicolor
cgtccgcatgggcccgcgctccagcgcctccctcgccgccgccctcgccaacatcggcgccgaggaggtactggccgacgacctgggcggcaggtggggcggcgccttctccttcaccgtcccggacccgtcctacgagagcttcaccgcgctcagcgacctcggctgcgtgctcagcgccaccaacgtcctggctcatgttccagtaggtcgccgacgcgaaaggcgccggggtcaggggc

SEQ ID NO: 460432 - DNA, 78 bp, Sorghum bicolor
cgtccgaaaaaaaaaaaaaaaaaaaaaaaaaaaaaaaaaaaaaaaaaaaaaaaaaaaaaaaaaaaaaaaaaaagaaaa

SEQ ID NO: 460433 - DNA, 224 bp, Sorghum bicolor
cggggctggagatgatccacgctaacgcacacgatgcatgacaacgaagatacgcttctacatataagggccaacccatggccaatgcactggcgcgaagcgcaacaacacctgagactgggaaaaccgtggcaagagctatctaaatctcatcgcatcacatctgcattgcggcagatgctgtgacacatacatggcccgatgagatcgcccaccccaacagt

SEQ ID NO: 460434 - DNA, 296 bp, Sorghum bicolor
cgtccgaaaaaaaaaaaaaaaaaaaaaaaaaaaaaaaaaaaaaaaaaaaaaaaaaaaaaaaaaaaaaggaaagagaaaaaaaaggaaaagagaaaaaaaaaaaaaaaaataaaaagggggctgcttttttaggggttccatttttttttacccaggcatgcccattttttcgtcttttttttggccacttaatttaatttaacgggctgcctttttccaacgtcgtgtttggaaaaaccttggggttacccaatttattcgccttgaacaacatcccctttccggcaggtggttta

SEQ ID NO: 460435 - DNA, 199 bp, Sorghum bicolor
cgtccgtgctgtgatagtatgtttctagatatgtttatctgaaaaaaaaaaaaaaaaaaaaaaaaaaaaaaggaaagggaaaaaaaagaagagaaaaaaaaaaaagggccgccgatataagaggatccaaagctaacatacgcgtaaaccctggcgctaccctactttattgggctagctgaacatccccctttggccg

SEQ ID NO: 460436 - DNA, 356 bp, Sorghum bicolor
cgtccgcagtcttctccggtccattgagcttcttggtatgcctctgccccatgtgttttcccctatcttcgcctatgatttgtttcgtttgctttggtgtttgctccgacctaggtgttggggtttccacaccgtcggcgccgccggtgtccgctgccctttcagtcatctccggtccattaagcttcttgttcaggtttcagctctgaaggtccgcggtgccctgcatttgtgcctggttgggtcgatctccatctaggtgcttccactcctgcatgctcctcagtatacaaatggatccgcagcttggtggtggatacaaatgcccaaaaggtcatggcacaaatgcattacct

SEQ ID NO: 460437 - DNA, 332 bp, Sorghum bicolor
cgtccgaaaaaaaaaaaaaaaaaaaaaaaaaaaaaaaaaaaaaaaaaaaaaaaaaaaaaaaaaaaaaaaaaagagaaaaaaaaaaaaaaggtataaaaaaaaaaagacaaacaattaaaaaaaaagataacaaaaaaaagtttaattattttttaaataactttactggggggtcccttataaaaaaacaaactttcctcccccttaaaacaatagtaaatgtttttatttgggggccccaaaattaatttctgtggcggcgttttcaaccggggggccgggaaaaacccgtggggttccccatttttattgtttttatgaaaccccctttt

SEQ ID NO: 460438 - DNA, 298 bp, Sorghum bicolor
  unsure (1)..(298): unsure at all n locations
cgtccgcccacgcgtccgaaaaaaaaaaaaaaaaaaaaaaacaaaaaaaataaaaaaaaaaaaaacaaaaaacggggggtaaaaaggaacaggcgggccgggcatataatatacaaaaggggggggggagctagaacactttccctagtccgccgcccgaaacttccaagtttagctgtgggtaagcacatggggggccgggtcttttaataacactcaccttcccccagatcggccncaagggcacgtcatatgacgtaccccagaagtgatcagcgcgcgggcactatcaaacaat

SEQ ID NO: 460439 - DNA, 412 bp, Sorghum bicolor
cgtccgctcttcgtcgccatggccgtggcgccgctggccgctgaggcgaaggagtccgccgacgcccccaccgccgatgcgccggccgatgccagcgggccggtgggtgcccctggcccccagggcgtcgacggcctgtcaggcaacgaggacgacgacgacgactgcaccaactgaggccgaccggccgagcacgtcgtctgatatatcgtcggttctgaaaacgaatggcccggttgaatttggaacaggacatggaagaaaaagtgagagcaatgtcatttaatttgaagccatatgtaataatgtgtggtcgtccgaggatttatatgttctttgctctccctcttttttctttctgtttgattatcgatgcgttatatcttgatcttaagttctggttgtaacaact

SEQ ID NO: 460440 - DNA, 76 bp, Sorghum bicolor
tccttctcgcacgtcgcggcttcccgcagcttaatcgggctccttaggtcgattaggttacgactcacccaaaact

SEQ ID NO: 460441 - DNA, 398 bp, Sorghum bicolor
cgtccgcggacgcgtgggtggttatccattttacaagggcagctggacatgagattggaacaggaacattcttggattggttcctttatagctcctctccggcagcaactgagggtcctccctgccagaaatgtggccacctagttaagtctgatggggtcatcacttcttgcctcgattgcttcttagatgggggtagcctgtacctgtttgactatgccgtgtcgcctgctttcttccttgccaaagctcgtggaggaacctgcaccctggctgcctctgaccccagtgatgttgtgatccaccgtgcacgatacctcctggacaatgggtttggcatgtactccctgttcaagaacaactgcgaggactttgccatatactgcaagactgggctg

SEQ ID NO: 460442 - DNA, 346 bp, Sorghum bicolor
cgtccggaaaatctccagatgactgcaaagatcgttgtggtttgcaatgatacaagcattggcccactgagcattattatgtttctattgggtcgctgcgtccttttctatttagtgaggtgaataatatacaaggggtaagtagcttattaatttatactattataatagggttataataggatgctttctacatgtcaatattcaattattaaaaatacaacgggaagataaaaaggttaggagaaggaatatgagttgtgatcctgtggggtatgaaaacaggtgttagctaggattcatatggaaatagggtggtagaggataaggattttcattttttatt

SEQ ID NO: 460443 - DNA, 170 bp, Sorghum bicolor
cgtccggttcgaaaataccatggtgtgtttcaacaatttcatacagtgcagagcactctggttgcaatgagtatttgtgaaatatactagctgagtgagcaaaatggcttgtgtaaataatgtcacatgaggctcctccatattgaagatacactgggtttcactttggc

SEQ ID NO: 460444 - DNA, 245 bp, Sorghum bicolor
cgtccgggcgacggcagactgccgacgaagaggtgacagtggcggcgggagtgttgccggaatacactgcggcgtcccgttctggccctcctccggctgtcttccaaattccgaagtttgtgtgtataggaggtatatacagcaggagaaaagaacaattctctgaacaggctatactacatgtgaagatcgattgtgaatttgtgatttcaatacgcaaatgaaaattcagcaagaattctcat

SEQ ID NO: 460445 - DNA, 87 bp, Sorghum bicolor
acggaggggggcccgcgcctacgtacgcatgctatcgagtcacttaattttaattcacgggccgtcaaattacatcgccgggcctgg

SEQ ID NO: 460446 - DNA, 355 bp, Sorghum bicolor
cgtccgggaaccgaagccgccgtcgtctcttctctggatcgcaagctgcgcgcaagggagggaagaggggagaagagaagagaagaggtggtggtggtgggtggaagaagtggggcgggatgagcgcggagaggcccgtgccgcgccgggagagcccgtggggtctgcccgagggcgacacgctgcagcccaaggcacaccgctgcaacgaccgcgccgaggacgtcgtccaggcttgctttgaagggaacccattcaagacagttacctgtccattcaagctcttctggcaatgcatgcgatctaaacctgaggaggtaccagccgagccctatacctacctgcagctagatcc

SEQ ID NO: 460447 - DNA, 176 bp, Sorghum bicolor
cgacccgcgctgcagcgcatcattaaccgcgggtggtggtgtgactaccagcatgacgactgctatagttagcagcgtactagccgctgcttcttttgctttctttccttgttttgtcgcgacggtcggctgttctccccgagcagctaataatggggggcctccttgagggctac

SEQ ID NO: 460448 - DNA, 352 bp, Sorghum bicolor
cgtccggaagaaactttgccttggcgtcaccctgcttctcttcttgctcctggtgtctgctgcccatggagctcggcttcctgatgccaaggacgtagcagcagcagcagcagcagcaggtgatggcgagaggatcacggtgaggacaggacatgggcacggctacagcagccacagcggcgggcacccgaacggcggcacgccggagcagggcggtgcaggggttgtcgatcctcgtaacaacaatgctaggagccaccaccgcaatggcgcggcgagcagggctcttggctactcttcttggctcatctgcacgctcggtgggaggagttgttatgatgcttcttgtatg

SEQ ID NO: 460449 - DNA, 422 bp, Sorghum bicolor
cgtccgctgagcaggacacactgttggcccagaactaccaactcctacctccattgaagccaccacctcaatatgaggaaacagaggatgagaatgaagaatccaacccaagtctgacaccgaacccagcaaattctaatccaaccttctcgcaggatcagagaaataacgagcaacagcacactccccaacatggtcagagggtttcattccaactcaatgctgtggcagctgctgctgcaaagcgtcctcggatgaccattgatcagctgaacatgggctaaccattcatcgtcgtcggttagactagtatccttttcctcatcctctagtctggagaataatgttttgaagagattagtgttgtattgggatgatcttattgactaccacccacctatttaccacgtgtgcagtacagc

SEQ ID NO: 460450 - DNA, 400 bp, Sorghum bicolor
gtcgaagactacgatcctcctcctgctggtgctcctccttagtagtatccttgttgtcgcggatcaagctgctacaacggcaacacaattgtctcctgccgctaaaaagtccattggcgacctcaatttagaggttgagaaggttatcgatgttgtcgtctctgctgccccacctgcgaagcagatggaaacaatgcatgccgctgccatcatcaatgctgcgcctgcagacaagaagctaatgatgatggaggactccttcaactcggtagctgcacccagcccgctagattgccccaccgtcgacaaggcctactgcgagacggactccaagatatagaaggcctttgatggagtcgtcgcggctgccccagtagagaaaaagttggaggtcagagct

SEQ ID NO: 460451 - DNA, 427 bp, Sorghum bicolor
cgtccgatgaattacaaataaaagtgttacgttatgtaaaaactttttatccagggacaataaggcggtcggaaaagaaaaggaaatatatataaaaaagaacttgtagtattcatgtggtgcctccacgctgcaagtggcaggtagttagagcagttagtacagcgttgcacgttgcatggcttgtcgtctcggcatgtggcccatagacaaatgcgtagggtcaatgcctggagatggaggaggccatagggatatactactaggagtaggccggttagttccggtactccatcgccacggtattcggcggcaggaggcgcgagattgcgggctcttgtgcttggcgctgcccggccggcggccctgaaacccaacaccccacgacggtgcgcgtcggggggggtaaacaataaatggcaagggg

SEQ ID NO: 460452 - DNA, 356 bp, Sorghum bicolor
  unsure (1)..(356): unsure at all n locations
cgtccgggcttcttctacccctccggttcggtttggatcggattcgtcaggttcttcgggggttccggatcgtgggtgagctgaagagatggcgagaattagacgttgagtaccgctgcttcatcggcgggctagtctggaacaccgacgacaaccccctatatccgtcttaaagcactaccgtgtggtcctagagtgcaagatcatacaggatcgggagacgcacacgtctcaacacttgcgctcactcattatcgaaacggacacgccctgtcgaggcgcactaaaagcgctgaacgtgaaggatactcacagagngaccattacactctacagagccctatagcgcgctcttc

SEQ ID NO: 460453 - DNA, 400 bp, Sorghum bicolor
cgtccggcatgatgtccacggagtcggtgttcggcctccaggtcgcgccgtccagcgacttcaccggcttcttcctggcgcacccggagctcatggacatcgccacgccgccgcgcagcagcagcgccttcgccgacgccgacgccgacgccaaggccgcccctgtcatctcgccgcccttcgagagcatcccggagctccccgagagcgccatgaagggaaactactccttcgccttcccaaacttgatagaggacaagaggaactactccaagaagcagtcgcagcgggaacaccagccggagccagcaacaccaacggaggtggccaagcccgcaccagcagcaccggcgaaagctgaagcgaaggcggaggcgcagccggagacaagcagcaaacc

SEQ ID NO: 460454 - DNA, 90 bp, Sorghum bicolor
cgtccgaaaaaaaaaaaaaaaaaaaaaaaaaaaaaaaaaaaaaaaaaaaaaaaaaaaaaaaaaaaggaagagggaaacaaacatagagag

SEQ ID NO: 460455 - DNA, 466 bp, Sorghum bicolor
cgtccggccaccatcagcgacatggatattcatgtcgtcgacttcaaccttggcgacggcatacagtggccatcgctcatgtcagaccttgctcgccttggcggcaagtcattccaccttacagcaatcataacagatgctggttacagtgacgacactcatcaggcagctgcacggcggctttcagagtttgctgagtccttgaaccttcccttccagtacagctctctctgcatacgccatgaggaggacctggaggacttctccaggaactgtggaggctcagtggttgtctcatgtgacacaacgaatctgtgttacagatcaggtagcaagttacagatgctactacttggctgtgtcaggaagttgcaacccaagtcagtggtggtcatagaagaggagctggtcagaattgtggaaagaggcctgttgtcccaggccttcttttgtgggttcttcttcg

SEQ ID NO: 460456 - DNA, 158 bp, Sorghum bicolor
cgtccgcccacgcgtccgtggaaggagaagttgcaactcaccacgagccagcaaaggggaaggacaaggatcacactgaagaggcgaaacctgtgaaagacaagaaggaaaagaagccaaagaaggaaaagaaagagaagagcaaggacaaagaaaaa

SEQ ID NO: 460457 - DNA, 99 bp, Sorghum bicolor
cttccggcctccatcagcgacctgttctattcaagggttcgactctacgtgggcgaccgctggggggggggactccactggggggggggcgctccaggg

SEQ ID NO: 460458 - DNA, 250 bp, Sorghum bicolor
cgtccggttcatcatgaaagaagtgcttcacaaggatggaaagtattttgatacccatgataacttagcgaatccagagtaccaagatctcatagaacatgaggattcgtagtaccaagcaaaacaatgagtggaaacttttgttgttcacacgtggtacttatatggtgtatttttagttatttttgtagtttccactactgtttgtagatgaagaaacaatctacctgtgagtctatgaattatatac

SEQ ID NO: 460459 - DNA, 431 bp, Sorghum bicolor
cgcgtccgggtttcgatttggtttgctcgacccgaggcttcctttggccttgcggcttctctcggtgtcatagtttggtgtctggattcgatctgcaggatcggaaggaaggaaggtgttggacgtggtaattaccacctacaagataagagaaacttctctttgtaatttgggatcaagcttgtggatgggcgaaccctcggcggacttcagtgctgaaggtgttagcagcagctcaggtctctgccacagcacctgtttaaagcctggttgcgagcacggtatggcttgctgggaagatgaatatgttgaagctgtaatatcttctgggtgagatgatttggcgggtgaggaaattggaatggctcttactgaagtgatgcatgccaaatgatacgaagaatgggcagggctggatgaagattctgaca

SEQ ID NO: 460460 - DNA, 334 bp, Sorghum bicolor
  unsure (1)..(334): unsure at all n locations
cgtccggggaaggacagagcgatgtactgttactgtggtgtgctgagcaggtggagcgttgtgcgcaagccaggacctatgcagggacggtacttctttggatgcggaaactggaccgccacgaggcgggcgatctgcccatactttgcatgggcctcgtgaaggggtaatatgctgctgcagtgcaaagcagatctcaaggggcaaaggacctgatgctttaaccttaagggnnctgntcttncgctgcgcctcccaatccgtatatattatgatataactttgctcataagacaatggaagttctctaggtagtgtttaacctgtcatactg

SEQ ID NO: 460461 - DNA, 461 bp, Sorghum bicolor
  unsure (1)..(461): unsure at all n locations
cgtccgcccattggtccgatgcaatttactgattccccccacaaagtaatcgagaccgaccacttcaaactgtctggggctgtaaacttcttgtctgtcaaggtagcctcttcagatattggcttcccaatccatgtgtatggcactgtcattgtcagggacagcatcgatgagaggtgtgtttatcacttccgctgcgaccctgaccattgccaactcatcaattctgaggctgaatcgttgatcttgactgggccgaaacgtgggctcgcattgtgtggttacatgtatgtggagattgatctaaagatcaaggatcatctaggacagtccagagaatttagtaaaggactcttaagcatcagtgacccaacaaatngttgatcgatggtatctatggtcgaaactatatcccttgttaccaggctcaagactggggatgtgacttatgcagttgtgaa

SEQ ID NO: 460462 - DNA, 187 bp, Sorghum bicolor
cgtccgagcacgcgtacagcgacacgtgctgagatgctaccaatcatgcgggtattagggggtcggcgggatgcttgcactcacgcgtggtaagacctgggctatgcgagtgagtggcatcttttggtgtgcttcactacgcactatacgcagaccactcgtgcccatggacaagggtagaactaga

SEQ ID NO: 460463 - DNA, 441 bp, Sorghum bicolor
cgtccggccccgcctcctgtctattgatttctgcgcttcttccctgcacggcggtgcaaaggaccggcagagagaggtggaagcaagccaggttggagacagcggaaagaggctgaaagtttgactgatccatggatctcggcagcatattagcaccgtggcagggctgatggctgcaagttaattatcatgtagaattaacattatggctttgttctgtcgagcagagtagacatgtagaacctggcagaatgtgttaagtttaactactagatgtttgaatcatttgtggtaacctagtgttatcagatgctgcttttctcatctgagaagtggcctggtaactagtaccagtacgttctagacaatggtggaatcatcctcactgtgatggcaccttttggaagattgttctgcttatgcagattatctatctatgtg

SEQ ID NO: 460464 - DNA, 443 bp, Sorghum bicolor
gcacgcgtccgaaaaaagataaaacagaaacagacactatataaataaaaaagaaaaaggtaggaacatcttgggaaagtacaaaccaaaaaaaactgggactcagaaaaaagtggaagccatggaggagtctgaaatggtggacgtgtggctggggcgtggaagcccaggaccacgaggccgccgcgaggcccatcctgtggcactgtatcatcaacaagctctagggccagttaccgtgaccagggtttaaaggacgagagctgtgcgaaacctggggattgcgctccttgtgtgctaggcgaggctgtcccttctccaggtacttggtcaacgaccgaatgggcctttccgacctcactcactaatacagtgtgcactattttatggagagggactcctcctttttggtcctcatttacccccacgttgagggggttttc

SEQ ID NO: 460465 - DNA, 275 bp, Sorghum bicolor
cgtccgcggacgcgtgggcatctactagctttcactttcctgagcaaaacttgctgcatataacaataaataaattgactctggtttctgttctttctgcaacctgcacagagttccttgattttgttttaaaatttaaagggatacgacctatttctattttttcaccttctgattctgattatttgttttgtaatgctctgtgtatcagttcataataagcacaatgataaagttcctttgtgtgattggagcttcatatcctatttcaaaaa

SEQ ID NO: 460466 - DNA, 451 bp, Sorghum bicolor
cgtccggagatcaaatagatgtgacgatggagttgccccctgaagaagatggcttggtagcaatgacgattgcttctgcattggaggaccagataaatttgacacactaattgctgcatttcgtatagtctggactctctacctctggatatgtggtctttcactcattgtctgcctaaagtcaagtttttggcaagcttccaaaatttgatcggtgtggtacaaccttttaataattttatatccacctcaacttatgtttgtcatatgcactgttacgtgtttctgcattcaagcactccattctgcgatccaattgttatggtgcctgacattttagacaatctttttggattatttctttgtgtttgcaaaaagattatggtttgtgtaaaatgattcgtttctgctatgatcctggagagtatgactgtaagccacaagagctatt

SEQ ID NO: 460467 - DNA, 451 bp, Sorghum bicolor
cgtccgcagcgcccccagcccatcgcacccaaggccctcagcgatcgccggagcccgggcccccctcgcgccggcggtcgccaatcatggccaccacccccgctgaggagctggcgcctgggctgcctaccaccacccccgacgagaagccggcgcctgcgcctgcgctgcctaccaccacccccgccgaggagccggcgcctgcgctgcctagtaccaccaccaccccctccgaggagccggcgcgtgggctgcctctgcctcctcccaaaggtctcggcgacgagccgcagccgcggcggcggcgcccgtgcgtgctcctcagcttcgcagccgcgcgcgaccgcttccttcggggccggttcctctccgcgggcctgcgccccttctccgtgcgcctcccttcgctggcgggcaccaagcaccgtcgtccacctctgggcgcccccgc

SEQ ID NO: 460468 - DNA, 380 bp, Sorghum bicolor
tttttttgttttttttttttttttttttgggcgactacctggttgaacagggcatgtaaccttcctggatgtcaatatatggcttggctcaattcaaatttctttcaataacaaagccaacaagacctttgcatgtttccctgtttgcttgcattggctctttttctccaccgccacaagatgaaaatagtagctgctccgctggaagttttcaattttggctcactccctgtagtttacattcttgggttgcttcgatcatttggctgtaacgtgaataccatggaggaatgccctatatactaagcaagcactcatatatatatatataaaatccttttttccgcaagaaaaaaatatgtcaacctaagtttccttgt

SEQ ID NO: 460469 - DNA, 68 bp, Sorghum bicolor
cgtccgaaaaaaaaaaaaaaaaaaaaaaaaaaaaaaaaaaaaaaaaaaaaaaaaaaaaaaaaaagaag

SEQ ID NO: 460470 - DNA, 70 bp, Sorghum bicolor
cgtccgcccacgcgtccgaaaaaaaaaaaaaaaaaaaaaaaaaaaaaaaaaaaaaaaaaaaaaaggggcg

SEQ ID NO: 460471 - DNA, 441 bp, Sorghum bicolor
  unsure (1)..(441): unsure at all n locations
cgtccgcccgtagtgatctctgcagctagctgaattattaatcatctgcaaataagatccgcgacagaaaacatcacgtccattgcagatcgtaatatggccgttaatctcgtcgcggttccatcctcagggactccaattgagcccgggcacgccgacagatcaaggctgcagcagcagcagcaccatcttttattcaggcaggggaccaccgatcgaccggcgccggcgccatggctctgagccagagcacgcagctcggcctcgccaccgcgctcttcggcgtgctctccttcgtcctcgccgtcctcgccgagctcaagaaaccgccgtacgggacgccgatcaagggacgggacgtcgtcgtctgccggttcccgccggacccgacggtggcgctgggggcgctgtcngcgctggccgcggcgtgcaacgccgggc

SEQ ID NO: 460472 - DNA, 274 bp, Sorghum bicolor
tttttttttatttttttttggttggttttttttatttttttgtttttttatttttaattaattttttttttattttatataatttattgacaaaaaaaattatttaattaactaaattaataataattaaataatatatatttgagccggcttgacaaaaaagaggaaagaatacacagaccactttaaaaaaaaaaaagacataaataaagaactaatcacacatgatataaaatttataaataagccagtaaaaaaaggatcgatcacggag

SEQ ID NO: 460473 - DNA, 228 bp, Sorghum bicolor
cgtccgctctctctactctatcttcttcttaagaaaacaagcataggagggagaaggcagcgacggcgcggccgggcatgggcgtccagccctctccagcgggcatgggagggagcacggccccctagcaccaggggccatggctactcgcagcctgggcttgcgaccgtccacggcagcggcaggggcgcggctcccggctgctgcccggcaggccagaggctctag

SEQ ID NO: 460474 - DNA, 152 bp, Sorghum bicolor
cgtccggtgattcaccgttctgttttagttttgccttatgtgcttgggcatctgcctgcttgtgctatgccgatgcatgactaaaatggtggttcgaaggacagtggtatctgctacccttggttatgttaagtttcccttatcttggaact

SEQ ID NO: 460475 - DNA, 403 bp, Sorghum bicolor
cgtccgaaaaaaaaaaaaaaaaaaaaaaaaaaaaaaaaaaaaaaaaaaggaaaaaaaataaagaaggggaaaaaataaaaggcgcgtgcatgtcaaagaaataaagtggggcggtcgctttaatggatccaagtttactggcccttgtttgccaccgcttaactttggtatagcgccgccttaatccaatttattggccttgattttactgcctcttgactgggaagcctttgtcgttacccagcttaatccccttgccgttattcccattttcgccgcctggattgctattgaaaaggcccgtgcagatggcctttccaaacggtggctctgtttgattggccattgggacccgcttttttggggcgcattctccgcgggggtggttggggttactcccctt

SEQ ID NO: 460476 - DNA, 408 bp, Sorghum bicolor
cgtccgcccacgcgtccgcttaaaatctcacaagtgctaatacaaaattgactggtgaccttccaatcaatattttggctcattttcaaagccatccttaatagtcattacgaatgtttcatgtcttacatcttgtcttcctttcaagaatgagaggttgctctactcattcttttttctggcgatgcaaattcatatctatttctatacacggggtgtggttttctaattcattgggcagtctaagtccttgtgcatgttccacagagtatcatttacataatcaaaaccaatgattaatcagttcttagctattccatttttacaccaattgtgttctttttttaaaaaaatagatattgttttacatttccacttcatataaagaaaacactaatgctactttac

SEQ ID NO: 460477 - DNA, 338 bp, Sorghum bicolor
cgtccgggatagggaagtaccaacaacaaccacattcttgcagccttggctgcgattctgggcgaatgaagaaaggagaggggttcagtcaagagatagcattttggtcgtttctcgtggctcctctttcttgcttgtgcagtatttgcacattcttaccactgccaccagattgcttgtgcatgaacttgtctggtgcaggaagtttgtgctagctgttggacttgttatttggctagatcatttttattcatgttttgttgtgattttgtatagagacatgggctgcaacatgtagtttcatgcaagaacagtggaattgatgaacttggtgtttt

SEQ ID NO: 460478 - DNA, 144 bp, Sorghum bicolor
cgtccggttatatatatgcaagcagatattgtgtgctttgaaacatagctataggcctatagctaaccaaggaggcatcgacacattgtaaatctaaggggttgccttataaacaaaaatattacagacattcttttacgggac

SEQ ID NO: 460479 - DNA, 396 bp, Sorghum bicolor
cgtccggcgacgacaatggagaggagacggcggacggctcctctcccatccgattcttgcttacgtgtacatagctgaggcgcagcacgtacgtacccattgtttagtgatgttctcgatctcttactgattccttgcctctacgttctagaacattctagatgaggggaagaagagggccgggtgatttcatccacctactacgcattcgcattcaagggttaccgctgtgcgtagctacttgcttaatttctcaactagtactacgtattttggttggacatacatggctgatggatctcaagagcggttctccagaagaggagacactttgagctctggagtatatatgtatcaaactttgcagagaaaagaaaaacaaacgtgtattctttg

SEQ ID NO: 460480 - DNA, 376 bp, Sorghum bicolor
cgtccggacgggtggaccagaagcataggctgaaacctggctagaagctacagctgtgtacaattcggagcgaaaggcatacattgatacattaagagcaccagccaggagaacaaacatgactacacaaagaacgtggaggaccggaagatgcaggtgcacctgctggcgaagttccagcacgcattcgtggccgccgaggacgcatgctgccaacacgttgggtcggtgaacaacgtggtcgaccgggacgtctacagcaggatgaagagccaccagcagaactacgacatgaacccgcaccacaactggaaggactgctgcagcctgcacaaccgcatactggccgagtacgacaagtacggcggcttcaaga

SEQ ID NO: 460481 - DNA, 303 bp, Sorghum bicolor
cgtccggtgccgcgtgggaaataagaacaaataaaagaagagacataataaaaaaatagataacaaaatggggggaactgaaaaagatgaggaaagtaataagaaaatgaataaggatacaaggcatatggctggcagataccatactgtgggactatacgggctagagaacgtttttttggctctgttatgcgtacgtacaccgttgtgttggttctatgcctgttgatgtattagctgcataactgctacttataaacatgatgatcaatggtgaaatgaaatgtgattatcttggggttc

SEQ ID NO: 460482 - DNA, 404 bp, Sorghum bicolor
cgtccggatcgtttgcacaaaaacatggccttcaacctggctcagtgcgccaccgctgcggcgtccgtcgcgccccgcacccctcgccctgctaggtccgcggtcgcggcgtccgtgtctgtctccacaaggaaggcggcggacggcaggctgcggctgcagcggcaggcgagctgcgagccgtcggtggcgccgtcgcgttcggtgttctgccgggccgcggtgtcggggaagagcgcggccgaccgggccgcctccaccaggaggaggtccggcgtgccggtgttcgtcatgatgccgctggacaccgtgaagaagtgcggcagcgcgctgaaccgccgcaaggcggtgcaggcgagcctgtccgcgctcaagagcgcgggcgtggagggcatcatggtgga

SEQ ID NO: 460483 - DNA, 398 bp, Sorghum bicolor
ggaagaaaaggatggacattgaaaaaacacaatcattataattgagtaattttgcatcagaggaagtaagccatcagattcagagcccataattggtgtcttacattggtaataatccatcagatccattgtgaacccacattttattacaaaaccacagttgaaatgtggagctgagacaacaactaagacgatgggggatcctcagtcctcaccatgtgtactgacaacatgttgcaaaaaaatacaggtcgctggcaaacaaatctggacatctattcatcatcatcaatgtagcgttgctcgttggctagcctggcacgctcaagcatcttgtcgaggtcctccttaagcttctcgtcaaactttaccagctggttcacaaacactgcaccgag

SEQ ID NO: 460484 - DNA, 314 bp, Sorghum bicolor
cgtccgcccacacctacggcaggagtggcctcttccgtatcgaccgctcctacttcggcgtgcggggaacgcacgccgggtatgccgaccacacacatacacatccagcacctggaccccaaaggctacctcgagtaaaacagctccgggataaaacttaacgcgtcgaaaaacgcgtgccacgcacccagggtccaaaagatcttaatacgctctggcaactcccacacagtaactctagagcttacaggtcgctgaatgtgcagcatcatgatccggcgtatacaataacctgctcttgagacgcgacctgc

SEQ ID NO: 460485 - DNA, 147 bp, Sorghum bicolor
cgtccgaggtcatgtaattttaaccaaattatttgaaaaaaaaaaaaaaaaaaaaaaaaaaaaaaaaaaaaaaaaggacagacgatataaaaagaacaaaaattgggtgcccgttcttgcggctccatgcttacttctctcgtgctt

SEQ ID NO: 460486 - DNA, 160 bp, Sorghum bicolor
ctgcgttgctcccggttcaggggatgtcacgtactcgtggttcactgcttttgaaacactactatctcaatttagtaagctgtttcaaggagctttcgtgatatgtatgttatttcttttcttgtggtttttttatgtgataagctacacagttattttg

SEQ ID NO: 460487 - DNA, 417 bp, Sorghum bicolor
cgtccggcatgatccattatatcacctagattgattttagtttattattattgagcatctgggttcatccaagtgtcagattcacatccctcttgatagaacaacatgcctaaaaaaaaaaaaaaaaaaaaaaaaaaaaaaaaaaaaaaaaaaaaaaaaaaaaaaaaaaaaaaaaaaaaaaaaaaaaaaaaaaaaaaaaaaaaaaaaaaaaaaaaaaaaaaggaaaaaaaaaaaaaaacgaaaaaagaaaaaaaaaaaaaaatgcacaaacaagaaggggggcggggtttaaaaaaataaaaacaattgaccggggaaagccaaatttaatcctttttaaaaggcccacaaataaaaaaacggagggcccattttaacaaacccggactgggaaaaacccggtgggaccccccctaa

SEQ ID NO: 460488 - DNA, 272 bp, Sorghum bicolor
cgtccggtgattttgtcgtgggaacaaacaaaaaaaaactgttttttttgggtgatgagtggcgggccgcactcgatgtaatatcgttgcccagactgattttgatgggtacgcaacaggaagcaaacgacttcttgtttcaaaaaaaaaaaaaaaaaaaaaaaaaaaaaaaaaaaaaaaaaaaaaaaaaaaaaaaaaaaaaaaaaaaaaaaaaaaaaaaaaaaaaaaaaaaaaaaaaaaaaaaaaaaaaaaaaaaaaaaaaaaaagggggg

SEQ ID NO: 460489 - DNA, 409 bp, Sorghum bicolor
cgtccgcccacgcgtccgcgaggagtaagcagctacgtatttccagatgctacttgtgcatgtgagaatcgcgggtggcttctcatgatcagacacaaaccatgccacttccaagagcagagtgcgttccttgttcacccaagctctggcaaacagcttaacctgccagtattcccctgtcgcgaacaagggtaccaagggttctttgttttctatgttggttctcacggaatacctctagtcgttgcacgtttcgagatctggagcattgttccgactgtgcacattgcctgccctggagacacgtactggagtgcctacaagcatggtgttgaacctcccatgtcaagaagaatgcgcagattacttgagcgcaattggatcgccgatttaactttgatcggggcac

SEQ ID NO: 460490 - DNA, 199 bp, Sorghum bicolor
cgtccgaaaaaaaaataaataaaaaaaaaaaagtaatataaaaaaaaaaaaaacaaaaaaaaagaagggggaaataaaaatagagaaaacacaaccaaatagctacggaaacaactgctgcctcccccttcttctgtctactacaatcttctcctgtggggctcgcgcttttaccgtgttcctttcttctgttggcctc

SEQ ID NO: 460491 - DNA, 450 bp, Sorghum bicolor
cgtccgattttaaaaataatttgtggcctctggaactttttgacctttgggttgtaagctcctcagtaacgaaaattctggtttctttcattcattgagcctcgaaagtcctaaaaaaacgtttgattaaggcattttgtcataggtttatatagtttgtgccatcatccatcagttcctttgtgcttatgtcgagttaaattgttgtttgtcaggagtttggacaaaactgcctcagcatgtttcatattttatataattttaatacaaagaatttatttctatttcctttggtaaatttaacaaaacatgcgatgttgtcattcactacattgacatacaagcctcgtgtttcagtatttgataagaattatgtttttaaccacacaaaataccaaacatcaacaatttgcattaaagcgattttcattaaactattaatagactcac

SEQ ID NO: 460492 - DNA, 91 bp, Sorghum bicolor
ggagtacattgacagggacatggaggccatctagctgagaacaccttgcagcacatcaactagaaaggcttgaactggggccagactgtga

SEQ ID NO: 460493 - DNA, 112 bp, Sorghum bicolor
attcccggcgtacgacccacgcgtccgcgtgactcttgagtgtacacaaggaaaatgaaaaaaaaaaaaaaacaaacaggccaacggggggggtataaaaagctggtgtacc

SEQ ID NO: 460494 - DNA, 341 bp, Sorghum bicolor
cgtccggttttggggtaagtagctagtgtggagcaatggccaacgggactgaatccgcggctcgctgctgcttcccgatctggaaaacccggcgactgcgagttgagaagaggccgggaacggcggcagcggccggttgtctgtgggtccgtccacttggcgtcgcatggatgtttgtatactggcacttttgcacggtgtcgcgagatttgcgagatgccactttgttcagtggagcaggaaagtatatatatctatacttatatatactagcagcaatttgcttcttgtaactgtgcagatcaataaactgtataagaagccctccattttttcactca

SEQ ID NO: 460495 - DNA, 447 bp, Sorghum bicolor
cgtccgaaaaaaaaaaaaaaaaaaaaaaaaaaaaaaaaaaaaaaaaaaaaaaaaaaaaaaaaaaagggaaaaaaaaaaaaaaaaaaaaaaaaaaacaaaaaaaaaaaaaaataaaaaaaaggggggggccgttttaaaggaccaaacttttcccccccctcattgcaaggtaatagtttttttatggggcccccaaaatcaaattcacgggccgggttttaaaaacctctggcctggaaaacccctggcttacccaaattaaatggcttgacacaaaatccccttttccccatttggcttaatacaaaaaggccccgcacaattcgcccttcaaaaatgttgcccacctaaattggaaaagggacccccccttttaccgccctttaaaccccgggggttgtggggttcccccccaggtaaacctttacatttgcaagccccttagcc

SEQ ID NO: 460496 - DNA, 108 bp, Sorghum bicolor
cgtccgcccacgcgtccgaaaaaaaaaaaaaaaaaaaaaaaaaaaaaaaaaaaaaaaaaaaaaaaaggggaaaaaaagaaaacaaaaaaaaaaaaaaaaaaaataagg

SEQ ID NO: 460497 - DNA, 433 bp, Sorghum bicolor
cgtccgcaaatgaggatggggaatcagctgggcagatgcagaacaccacggaacccgtggaggccaaaccggcggtcgatgagcacaaggcggaggaggcggccgtcgtcccagcaccgccgtcggcggaggagaagaccaccaccggcaccgacgaacagaccgctgccaccgtcgtcgcgagcgaagtggccgccaactaatcaacacagattagaaggaggccgcgaagatctagacgacgtgcgtgcagcgcgcgcatcgatcatgcatgcatgcatattgctgaattcgggcgggttgtgtgtctgtcactctgtctgtctgtgtttatcgatctgatgcatgatgatgcatggaatgcgttcgttgtacgtggggtggacttgaatattaatgtgctcgatcgatccaaaccattctcgcgaagcca

SEQ ID NO: 460498 - DNA, 327 bp, Sorghum bicolor
cgtccgcaggaatgcaagctttattagatctgctgtttgctgttgaaggttccatatcagatgcagcgaagattttaggcctaagcactggtgctttgtcaagactgattctgccagatgattctctccgaacggccgcgaatgaactgcgagcttcgaagggactgaagcctctgaggtgaaatcctttgtaaaattctcagcttcaagtgaaccatatcccataggtgccaagttccatagaagtgagccggcatgatttctagggaaaaccttcggtgtctcatgctggctctgagggatgttcatcatcatttagattgccgt

SEQ ID NO: 460499 - DNA, 383 bp, Sorghum bicolor
cgtccgcaggcaacaggtccaggatgttctagaggcagcgaaggtgcttgaatggctcaaggagagctgtacagtcgagtatatcaggcgatgagtctatgatgctgctgggtcaaggctctctgaacgtgagaaagatggctggtgtggcggtgggcaattttgtgagtgaccttggtccttgccaaccaacccatgcaatgaagaatcttgcgcatagcagaccagtgcagtgattaagattttgtttctatatagcataagaaagaagtatactatattttgtaagtacaatgcgagttcacaaaagttgttttttgacggtcgttcacaaaagttgtacccagtctttaagaggttgtaatccacattgcaacagatca

SEQ ID NO: 460500 - DNA, 319 bp, Sorghum bicolor
cgtccggttctagatcgcccgcggacgctctagagcatccaagcttcccaacccgtgcatgcgaggtactatacttgttatactgaaacctaccaacacttgactatctctattcaaacaccgtagagacatgcaaaaccctccctgctcccacacttaacacgcttgcagacatcctgctcttcccagctctggtagtagacaacaggcatgcacaggacgcccttcacaacacgtcagaagtctcaatggctgaacgaaaacgcgccttaatctccattaagcctggaagggtggtggtaccgcagcgctccgatca

SEQ ID NO: 460501 - DNA, 67 bp, Sorghum bicolor
cgtccgcccacgcgtccgaaaaaaaaaaaaaaaaaaaaaaaaaaaaaaaaaaaaaaagggcgggggg

SEQ ID NO: 460502 - DNA, 389 bp, Sorghum bicolor
cgtccggtaggccctgatagttgtacagtagtttctaatttgttgaaagaaggaaaggttgaaggttggggagtggagccttatgatttggaggatactgacagtacttgcaaaagcctcgtgcgcaagggcttcgtccgtatgtctgatattaagttcccccttccataccgtccagattcttttaatcttgttgtcgtgtaagatgctttagattatctcaccccaaggtatgtgaacaaaacacttccggatttagcaagggtttccacagatgggcttgttatttttgctggcaatccaggggagcagaaagctaaggtctcagaactaccaaaatttggaagaccggggaaattgcggagttcttcatgggggacacgatactt

SEQ ID NO: 460503 - DNA, 105 bp, Sorghum bicolor
cgtccgcaagaattagatgatgccgagcgaataatgagtggaaaattgagtgaaaccagtgcaggggcccgtgctgacctctatgactacaaggaagttaatggc

SEQ ID NO: 460504 - DNA, 295 bp, Sorghum bicolor
cgtccgcccacgcgtccgaactaaatgaggcttacatccatcgtatgctcaccgggaaggcttttgcgaactttgaggtaaatatccaactccaagtaacttcctaatcttccaactttgctaaatcagtgttcacatttctctgaaggacctgctagcaaatattaaatacagtgtacagtgcatatctagagtttgaaatgtgagatggacgatagatcctatataaccaattgtggtctggaggactgttgaaagcccattgcatcaaaaaaaaaaacaaaaaaaataaaaa

SEQ ID NO: 460505 - DNA, 247 bp, Sorghum bicolor
cgtccgaaaaaaaaaaaaaaaaaaaaaaaaaaaaaaaaaaaaaaaaaaaaaaaaaaaaaaaaaaaagaagaaaaaaaacaatcaaacatacgcacacctccataactaattacctctttcttcctacctctttcatttttttagctgccttttattttccggccgtcttacttcattgaccatccttccacccacctaactcttgctacttcccttccttttccttttttgactagcttttttatta

SEQ ID NO: 460506 - DNA, 401 bp, Sorghum bicolor
cgtccggaccacggcaaccgtaccacaccgtgtgccttgatctgccggcctctccattccgactctgtgttcgttctgtgcaagaggagggaggagaaaggcagagagaggcctccatatccagataattaacacatacaagctattccagccggttctgatccattgcggttacacacatatatacgcgacataatatatatatatatatcagtcgtcactctcgctctgtcgtcgcggcggccgttccacaagaaacacaccaactccctcgcgcaagaaccaactcgatcccgaaggaagacgaagaagaaggcgatcccatccaccaagcggcggcggcaagcaagatggttaaccttgacgaagtccgcaatgtcgtcggcatcatcggcaacttc

SEQ ID NO: 460507 - DNA, 341 bp, Sorghum bicolor
cgtccgggtagggggtagcggcaaagcagatgccgatgccactgctggaggagaagctgaagcaaggaagagcagcagttccagcgcaagtggcgatgctggaggaaatgaaggtggcgaaactgatgcggatgcaactacttctagtggcggtgaggcaggaggtagtggcaaaggagatgtcgatgccactgctggagctggaggagaagctaaagcaagtaagagcagcagtatcagcgcaagtggcgatgttggaggagatgcaggtggcaagactgatgcggatgcaactacttctagtgacgttaaggcagggggtaacggcaaatcatatgtcg

SEQ ID NO: 460508 - DNA, 316 bp, Sorghum bicolor
cgtccgcgctggcccccccgtcccgtccgtgccccacccaccaccctcgtcggcgtcgtcctcctgtctgtcctgtgcacccccccccggccaagaaggcaaggctgcctgctgcctgctggttggacctggaccaaggacgagagagagaggctcgtacgcacgtcgctgctggtggtaggggtatacgcgcgccatggacgggggcacggtggaggatctcatacggcggctgctggacggcaagaagcacaaggtgacggggaagaaggcggtgcagctgacggagcccgagatccggcacctctgcgtcacc

SEQ ID NO: 460509 - DNA, 54 bp, Sorghum bicolor
cgttcggcagtcaaggcagatagctagcagcgtcgcaataatggcccgcgcctg

SEQ ID NO: 460510 - DNA, 376 bp, Sorghum bicolor
gcctgcggtaccgcgcagtaattggggggtcgcacgcgtcgtttgagcttttagggtcatccttttttccgaagagtaatcgacctcacctgctaaagtacggctttaataaaggaaaagcggtgcttgtgatgccaccctcttattcttcagagattcaagagtcagaaatgggatcttggcacattccgatggaagagaagtctggggatgagagaggtaggatttggctttgtattggcaggggaggttcctgcaaagaacatggtgaagttcccacaactaatggagttgtccacgaaattcctccaaccgaggcatctaaagtggtgcagcagaggctggcagaaaataagaatgagacgatctctggtaa

SEQ ID NO: 460511 - DNA, 202 bp, Sorghum bicolor
tgctgcaccatgggctgctcctgacgctggtcgtgaaagtccatgcgctggaggaaaacgccggcgggagggcgctgtcgtatggctcggagccggaggatgagagcttgagagactactcgcgggtcttcgaccagttggcggacgatgcggacagcgtgatggtcccatcattcgtgctgtcgccagatagatcgcctct

SEQ ID NO: 460512 - DNA, 107 bp, Sorghum bicolor
tcgacgtccggggaagtatgatacacgctaggtttctgagagccggtaccctatgcaagacttgatctgcgacacaggatgtttgacgtgatgaactacacatacat

SEQ ID NO: 460513 - DNA, 440 bp, Sorghum bicolor
tcgcgtccgatacactcccacagccatccatcccgtcacccacccacccacccacccgtccacagccagccaaatccgcctccgatccagcgcccacccaccacggtttccagtgagtttgagcgaggtaagcttagatctgagcgagttctcgcgcgtcgcaagtaaagttcactcgaccctctcatctttttcctgctaatctcatctccttcttgctttggtttcgtcttcctcgagctgacagcgagagacccggggccttttagatcctgggcttcagatctgcgatttcttcttcttcttcttcttcggtttggttttagcagtctaaggttgttagtaggttggtagccaagatgggttctttttccacacctcccttgtgcaagtatgttcctgctgagcagatctacccaccagtgccatctgtttttact

SEQ ID NO: 460514 - DNA, 483 bp, Sorghum bicolor
cgtccgcaaatgggccagcatcgtttccttcaccagcaccctcggcatcaaatggcaatatgatgcctgctgctcagcactcaagccaaatgaattgccaaccatgtcatcaaacccacctcctatgcaaacacctacaagtcgacttcaggaacctgagccaaatgagtctcaaagctcggtccagaggatattgcaagacttgatgatgcagtcccatattaatggtgttggaccagtgggaagcgatatgaggagagcaaacacaattactcctggtcttaatggtgtcaactccttagttggtaaccctatgacaaataaccctggaatcaatggaatgggatttggggctatgggtggccttggtcaacaaatgagaacggctatggggaccaacgcattggcaatgaatggaaagaccgggatgaatcacagtgcgcatgacctgacacagttgagccaccagcagcaacagcgaga

SEQ ID NO: 460515 - DNA, 326 bp, Sorghum bicolor
tcccatcgcgtccgcggacgcgtgggcgctgagttgggttttcctccagctgcgttgctgattatgaaaggagtggtctctgcgctgcacatacgaccctgatggcttccaagctagagcatgatcctggacatgcacgaagcatggtcgggccttcccacttcagtggcattgtctccggttcatcagctgctgatagcaacatggaccatgccatctcatcatctggccatggcgcatggtcagactgcgttgactcgtcaggagacatgcagagcgctggcaggctccttataccacatcaagtgctggtccctggctcattg

SEQ ID NO: 460516 - DNA, 358 bp, Sorghum bicolor
cgcccatcgcgtccgggaatgcttgatatcatgctgcatgatatgtgcccggttagcttgtgctgcttccgatggccatcgacagtgctgcatatacatctttgcgccagtttgccatgctttattacttatactgtgggatcagaggacaatctccttaaccatttttatcgtttgtcagtgtttgtgttcttttcttctttgctgctgctacccatatgtgttcagccgcatgcgtgaaatttggtcatctgctgctgagatctattttgtttaggagtgagtggtagagagactcacaagagactgtatgctagctctaagctatgggatcaatctttagatgcacacataagtt

SEQ ID NO: 460517 - DNA, 148 bp, Sorghum bicolor
gtccgatataaaaaaaaaataaaaaaaaaagaaagagctctggccgatcagtcaaaaccagaggtgcatgaattaagcgtatgcctgtaatgtatgctcgggggacggatcgcgaggggtcctgatgtgcttgccctttcatacccct

SEQ ID NO: 460518 - DNA, 200 bp, Sorghum bicolor
cgcgtccggttcttgtatatctagtagacagcttcctcttctagtgtaaaaaaaaaaaaaaaaaaaacaaaggaaagggaaataaaaaaaaggagggaaaaaaacttaaaaacaataaaccaaactaacacaaagaatatcaaatattccccggcgtgtccctatttttgtgtacgagcttgcccaaaactccacggggg

SEQ ID NO: 460519 - DNA, 365 bp, Sorghum bicolor
tcccatcgcgtccgagcaatatttatagatggagtagttaacatggaatatagttaatttcggatttttttttggagagggggaattctgagctagtttagagctggactccacgttattatgtgctgttttacacatggatccgagttgtatttggaaggcatttatagatattcaacatttattgagctaatttggaatttagttatttttataggtggaatataatacagccaagttataactggcgctgacatttaaaaaacaatagaacgtctactatttctatgctgattagaattcttctataaaaaatgcttctgacaagatcctatgcagccaataaaaatatttaaaaatattgc

SEQ ID NO: 460520 - DNA, 433 bp, Sorghum bicolor
tcgcgtccgctagaactatgtcgcgccacgacgcaccgctcctgaacgtgccgccgacgccctgtcgacgccgcgcacaccgcctgccgcacgccgccgtcaaccccgcgccgcgcgaccttgcctcaccgagcacccgcacgccgccaccacaccgccgtcgtgcacaccggagccaccctcgccgcccgccaagatccctgtagcatcatcgttggcgagccacttcgttcccaagggtcgctttcgcgaccaataatctacgtgcggagtcggaggaggatcagactgacgaggaccgtgagtatctggaggagttaggcgacgactactccgaaggttcttatgattccaagggatatagcgactaggggattcgtgccttcgatcaagtagatggagtttctaccttccgcatctatcgagctgttcc

SEQ ID NO: 460521 - DNA, 439 bp, Sorghum bicolor
ttccctggtcgacccatcgcgtccgcccatcgcgtccgatgggagggacctttttttcatctacctcttcttccagtccgtagcattcttgattgtcggtatcggctatgtcggcacaatcgtcccgcagtcgtaacagaagcatgttcgttgcatgttcagatcatccgcctctggttttcgcattgtcttcagcaagtttcgtagtggataaccagtttgaagtaaagatcatgcggtcctctcttccatcgtctgtttgggggaccgaccatgtagccttctgttgcatgtgcagtgctactgtaaaataggaaagcagtgttgcaagatcactgcaggaaagtttagagatcggagccatatgggcaggaaatggcagagggtttttgcttatatattatagcaactttgtgctgtgttctaaggggggggcagg

SEQ ID NO: 460522 - DNA, 392 bp, Sorghum bicolor
cgtccggagagctcggagctcggctcccttcttctcgggacccccgcgcgcgcaccggctgggtcacctagacgcggcggccacgcgagtcctggttgcatggatcactggatcctgaggcacgaaaaagatggcttcactcgtcaggtctgggtcaagccatgatggagaggtcactgctggatgtgctggccacggctgcgcaaggagggaccgaggggacgtctgtgctgaccatgctcaagttcgtctacattctgcagcccaacgtccgcaagctcctcaatgggcttgagttttcccttctgcttccatgccttatattttcccaatagggtagagcaatcactatcgagaaccccaagcacatggtcactgctgttcctgcagac

SEQ ID NO: 460523 - DNA, 377 bp, Sorghum bicolor
cgtccgactaatgctagactgacagccgactgctcagatgatacctgcttccccacgcttccgtgcaacgagggagctttgccttacagcaacctcaatgcatctaagtgaccgattgcttacatcgtagctggctgtgtatatccaatgtggctacccaacttaatcaactcgctgaaattcaactatcgtcatctggcctactaacgacatggcccacgctgttctacctttccatcaggaccgcagactgactggcgaccgggacgctccctgtaacagcaccattaaacgcggaaacctgtgcctctacacacactaatgccgctgcaccggccagcaccctatatgacgctgactcgaataaagcaccctta

SEQ ID NO: 460524 - DNA, 116 bp, Sorghum bicolor
acacttctgcaccaagcactcaacgccaacacacacctaaagcctcatctggcgactgcgagcatactgaaaacgctacacgaatggctaggttctcctgatcgcttaattcatcg

SEQ ID NO: 460525 - DNA, 360 bp, Sorghum bicolor
tcgcgtccgcgttcgctcaccactgatcccgcacccgcccgcgagcagaagaaaagtcctctagaagcagagcgcgcgcaaatcccaaagacgcccactggcggttgcgccttcactgcttgctttcccaacagcactactacacaggaagcggcgatcgtcatggagatggaggccagcggcgcgctatcatcatcgtccgtgctgtacgcggccatgtccctgccgtgcgcgctcctcgtgctggtggtcggcgaggcgggcctccgcgtggcgtcgctggcgctccgcggcgagatgaaggcctggtggcccacgcgcgccgcgatgctgggcttccgcgtcgcgccgccccggcgt

SEQ ID NO: 460526 - DNA, 322 bp, Sorghum bicolor
tcgcgtccgggcccccctcgcctcctaaacccttcacgcaccatctcgccgaggaccagggcggccaccacctaccccgcttcgccttcattcgccaccaccacctgcgtcgccggcaacggcgactaccccaacatcacggcggcgctggacgcgatcccggagagcaacactcggcgggtgatcctggacctgaagcccggcgcggtgttccgggagaagctgttcgtcaacatcagcaagccgttcgtgacgttcaagtcggacccggcgaacccggcgaccgtcgtctggaacgacacagaggaggcgcgctcgcgcg

SEQ ID NO: 460527 - DNA, 439 bp, Sorghum bicolor
  unsure (1)..(439): unsure at all n locations
cgtccgggagggtatgaaccagcatgggatgaagatggattcaagcctttggacatctgaaccaagaagcctatcgtgtgcataaataaaatggaggttcattacttctgcatgagaaggcaaccagaagctagatggctgacccatggtacaaattccaagcatcaccacggacagaatacaaggagttacgtggcattctacagatggatgaaagcatctttaagtctatgttgcagcccatcaaacggttcattatttagacttcccaataaagagttatgctcattttagtaactgctgccagaagctgagaagacgcgcgaaccagccacgaaatccactagtggatgtgcatgctgtcatgtattcaaagctgaacgcccctatctatatatatctcttatactagacaatgaaaggacacatnctggctggt

SEQ ID NO: 460528 - DNA, 218 bp, Sorghum bicolor
ggttctacaccacgagggaggcggctcttttgcataaatgggattcgaactcttttcttctgcatgaggaaagctccaggaagcaaaacgcggaccttcggtacaaacattttttatagcgaaggcttgatgtttggagtcccgggacattctacagtcacaggatagaatattgcacggatactgctttgcggcaaacccggaatcattcagacggc

SEQ ID NO: 460529 - DNA, 451 bp, Sorghum bicolor
tcgcgtccgcgcgccgccaggcgcatcatgggcgcctaagccaatgtctacttccccaacgacacctcgtggagcgtctccgccgtgccgacgactgccgcctgatcatcatcttcacaggccccggccgttctcccgtcgcccaaagtggtggcgcaagcgcaagtgtccgacgaggtcaaggagctgtcggaggagctgatggcctacgtgaactacatgaacttcctcggcatcccctacatggatggcgggaatgcagctgcaggtgccaccatccgcgccggcgtcgtcaccgtctgcgtataagctcatgtgcctggtgcgccagcccggctgtgggagcttcgatgtctactactacccagcgtctctgtcgctcttcactgaataatgaacgcggtgtttacctgtgcctggtttgttaacttttttgtaaaaagattttgct

SEQ ID NO: 460530 - DNA, 288 bp, Sorghum bicolor
tcccatcgcgtccgtgcaaaatctgtactagttgatgacgggaattgctcaaatggatccagcaaaaatgaaaagctagagctgggttctgtttctgggtcacattcataaagagagtcctcatgggaaaagtcccaactgacaacaagatcatgagctgaaagtggtgacttcgaatctgatggtagtgcagatcctgaggtaggaatgagggatcatctcatttctgtgaacagagctgctgctgctgcttcagaagaagtgctgatatcagatgaagtgacagca

SEQ ID NO: 460531 - DNA, 409 bp, Sorghum bicolor
gcgtccgcggacgcgtgggtttttttttttttttttttttttttttttttttttttttttttttttggttggggtatttaataccaaaaatgcgtccaattcccaaatcgcctgttgtgggggccagcgaaaactacaaatgctatccaagcgcctgagcctggcacccgcaacacactatttaatagattatttatcaataatcaaaaatcgaaagacatccgaccccttccaaaactacccactaagcacgggttacggataacctttgttcatgggccacttggcaataattaaaaattattatgccttaacttcgacccagaccccattcggtgggtgcataacggacaccgggcacggttcatgcacggtaaaaggttaaacgctaatcaatacaggctgctca

SEQ ID NO: 460532 - DNA, 391 bp, Sorghum bicolor
ccgaaaaatttttttaacaaaatacaataataaaaaaaaaaattaaaaaaaaaaaaaaaaaaaaaaggaaaagattaattttaaaaaaaaaaccaaaaccacctctccaaataaaaaaaactaaaatttaattacctttgccgcccccctttttaatttcccatgtttgcacccccaaccttccccaccctttttttttttttctactccccccattttaattttcttgtacaaaatcttataacccatttcttataaaaccccccccctcccccatttttttaacgttgaaacccttccccctttctcccttttcttttttatagaatattccctttccattcccccttccacttttttccccacccttaattggtaattttcccccccc

SEQ ID NO: 460533 - DNA, 437 bp, Sorghum bicolor
tcgcgtccggcggagcatctggtaccatgctctacaagatggacaggctgggggccaaccttagagttcatctactggtgggaggacaaggtctcaggccagaagagctgaatcatgttgaatgatgcctattgtgagcataccagtttgacaaaacattgatgtctcttatgtggaatgcttagtttttgtttcctagttttctctaataaggcgtgtattggttgaggaaaccaactggacaatgtattttcattgctgtcatgagtgctgtttatccttagtacttacaatgttcatggtcactctggtgtaaacagcaaatcctatccgttttcaagacatgttgtctcctataaaaatatgaagattaaacttgttgatcgtctggatacctaatcaatccagaagtgccacaattagatagaatttgctga

SEQ ID NO: 460534 - DNA, 125 bp, Sorghum bicolor
  unsure (1)..(125): unsure at all n locations
cgtccgtggcatatcatactgttctcaacatacctgccgcccttgcctgtggacacggtgganaaagggagagctttntccagggagattgaaacccgcttaacatccaagtgcgatgctttggc

SEQ ID NO: 460535 - DNA, 318 bp, Sorghum bicolor
tcgcgtccggacatatggcttaagcactgggctcaagtagaggcttgttcagagaagcactccagctgatcctgggggagtgtcctatccacgcccttcctccatatatatactcgtacaagtggttgccgcgttagatcgatggcgacggattagtcgtgtccgagtgaactagaattgaccttgttgctctaatgtccgaggtgacaatgttgaggatagatttagcgtcgagtaggcaaaaaaaaatataaatatttggatgagcagtccgagtttggcatggacagttcgatgaaaaagaaaattatctggacc

SEQ ID NO: 460536 - DNA, 295 bp, Sorghum bicolor
cgtccgtggctttgctctccagcatcgtagctcaccagatttgtcttgtggagatggagagtcattgagtgtacagcgaaccaataatatgttcttaatttctccttgttttcatttatctgtttgatgagatttattggttaaatttctgtagtagtcgattgttataacacagtaaaaagaagaagaaaagggtggtggcatttgcaggacaaaaccaatcgccctttccaacaatatcacaaactgaatggcaaatgaaaaagcgccctgcagcttttcattaaacgcctac

SEQ ID NO: 460537 - DNA, 58 bp, Sorghum bicolor
gcgtccgaaaaaacaaaagatagatacaaaaacgcgagcggaacagaaaataggggcg

SEQ ID NO: 460538 - DNA, 319 bp, Sorghum bicolor
cgtccgataattaatattgtttgctttcttttttgacagtgacaacaacggtctatatatagtagcatccgagtacagtataaacaagggctgtccttatattggttcaattccaatgaccaccttacattgcttatataatttatagtataggcactcatgtaataaccgcctaccgaaatgggggtatcagacgacaaaaccaacgtgctagccacgctaataatccaatgtgatacaatctcaatctttggcatactggcatgatgctatgctgtcactgtcgaatcattgtctaaaactacctaggaaaattttt

SEQ ID NO: 460539 - DNA, 357 bp, Sorghum bicolor
cgtccggctcggtctcggtggagcaggtcttggtctcggtggaccaggtctcgttggaccaggtctcgttggaccaggtctcggtggagcgggtctcgggggagcgggtctcggtggagcgggtttcggtgggccaggtttcggtggaggattcggttcaggacaaagcgcctcaaatgcagcagcaagtgctaatgcacaatctcaaaatcaaggatttggcggtggatttgttcaaccaggatttggagggggattcgttcaaccaggtggtggattcggtagtcaacaaagcgcttcaaatgcagcagcaaatgcaggcagcaacacatttggacaaaccgttggttaagtcct

SEQ ID NO: 460540 - DNA, 252 bp, Sorghum bicolor
cgtccgaaaaaaaaaaaaaaaaaaaaaaaaaaaaaaaaaaaaaaaaaaaaaaaaaaaaaaaaaaaaaacggggggtctaaaataatcgaggtgacgaacacttacataacaacaatttaactaatctaatatagacacctaaattaaattgaaatgaccataattttgcggcccccttttctgggaaccaccctttcgttcccctgcttaatcccttaatatcttttttttcctttccccagctttattcat

SEQ ID NO: 460541 - DNA, 329 bp, Sorghum bicolor
cgtcccgagccggtggagctggcccgggcgcggaagctgtacagcatggaggagctggagaagcgcacgagggggcggcgctcatgactctcttcaactacatgggctggaacttccagcaggacacaccgattaaactgaaggaagactggacgcttgaaacctaacggcaaggcaagacatttaaggaaggcccgatgcatgcatcccaaaaaggcctgtaccgagaccggtttcccacaggtgggcaggaggagcgcttagtcgcgcccctgatgataccatatattaatataggatcgtggggtaccgacccgcagactgataca

SEQ ID NO: 460542 - DNA, 382 bp, Sorghum bicolor
gcccagcgcgtccggagtcggcggagctgcccgcggcgcggaagctgtacgccaaggaggagctggagaagctgaacgaggcgccggcgtcgatgacgctcttcgacttcatgggctggcacttcgaccaggacgagctgatgaaccgcagggaggacggaacgctggacgccgacggcgaggccatgctcctcaagaaggcgccaagcatggcgcccaagaagttctcctacgttgacagcttcgccgccggcggcatgaggagcccttagtgcgacaccggctagtacggctcattaaaccccggacggcggggaacgtacccccagcgtggtgcagtcgccattgaccggcctccgatcgacttgctagcagcagcagc

SEQ ID NO: 460543 - DNA, 266 bp, Sorghum bicolor
gtcgaccacgcgtccggaaagttgaaactgccgtcttggacatcaaaaaaaaaaaaaaaaaaaaaaaaaaaaaaaaggggggggaaaattaaagggaggggagatctaccaaaaatgtccactcgattttaaagtggcacgcttgcatacgcttacatgcggctcactttatggggtggggggttctggagctttcaattttccggcctgagtctttcaacgtgtccgctttattatagtttgtcgttacccaaattaatggccct

SEQ ID NO: 460544 - DNA, 80 bp, Sorghum bicolor
cgtccgaaaaaaaaaaaaaataaaaaaaaaacaaaaaactaaacaaccaaaaaagaactaaaaaaaactaaacgaggcgc

SEQ ID NO: 460545 - DNA, 331 bp, Sorghum bicolor
  unsure (1)..(331): unsure at all n locations
cgtccgggagtttgtgtttatattgagagcttgtattctgttcacgattgatttaggagttctctgttttgcgtggtttctctttttatcgctctaccagtatatgcactggttctccggtggatcaatgcagatgctcacattttctttacctttgaatatgggtatccttcaccaggactcaatatgtatgattcttttctgtttcctggttatgatggtctgtaaattgtaaacattgggtttgatggatttgactttggagtgcaaagtattggcagttaaatnaaaaaaaaaaaaaaaaaaaaaaaaaaaaaaaaaaaaaataaaa

SEQ ID NO: 460546 - DNA, 379 bp, Sorghum bicolor
cgtccggcagcggaagctcccgtgctgattttctcaggaacaagctgctttcttattctaagcaagcggtacacctgtgcctacttgtgcgctgcaaccggtgattgactggtgggcataagctgttttctttctcgtgtgagcggcagtgagggtcaatgaggcaacctcaggcgttaggatgggcataaccaagccggacaacaagacggcttggttgcactgtttcgtaccccctatataagctgcagacatggtgactgtttgggatggtatagatgaatgcaatccagttctttggaccttgtaaatatatggatgatgacaccccctacctccaatgcattctcagtcctctgtaaagtactatatgctgtca

SEQ ID NO: 460547 - DNA, 272 bp, Sorghum bicolor
cgtccggggcctcagaaagtcagaatacgtgtgcgatgtaggccttgtatcgtagcgtcagcttgtaccgttttgtattgtaaactggcttcatcatcgaagcgtgtacggagtatgtatgctgtgtacggagtacggtggggtattactgttgtgcaggtttgatgtgatgtctacctagtacataggtcttgtttagttggtaaaaattttcaagatttccggtcagaaaaaaaaaacgctaatacacaaaacaaataagacacagagag

SEQ ID NO: 460548 - DNA, 495 bp, Sorghum bicolor
cgtccgaaaaaaaaaaaaaaaaaaaaaaaaaaaaaaaaaaaaaaaaaaaaaaaaaaaaaaaaaaaaaaaaaaagagaaaaaaaaaaaaaaaaaaaaaaaaaaaaaaaaaaaaaaaaaaaaaaaaaaaaaaaaaaaaaaaaaaaaaaaaaaaagggggcgccccttttaagggccccaattttcctcccccttccttccaacttaaaactttttttttggggcccccaaattaaaatccccggccccggttttaacaccgtggggccgggaaaaccccgggcttcccccaattaaatccctttgaaaaaaatccccttttccccagttgggtaaaaaccaaaaggcccccccccatccccctttccaaaaatttcccccccctaaaggcaaatgggaccccccctttaaccgcccctttaaccccgggggttgtggggtttccccccagtgtgcccttttcttttgcaagcccttagccccccttttttttttttt

SEQ ID NO: 460549 - DNA, 213 bp, Sorghum bicolor
cgtccgcgcatgccccgtgccccgccaccgccaaggccgacgtcggcgagccccctccctcgctctgcccggtgtgcggccaccccgcacccttctccgttaccccggcggcgtctgccgcgtcggccaacgcgtcccccgcgaggctgccgctgaagcggaggacaccacccgtacccgaggcgccacccgcggtggtgcgggtggagatcg

SEQ ID NO: 460550 - DNA, 412 bp, Sorghum bicolor
cgtccgggccaacacatatgaggagctaccggagcaggtgataggcgcagctcggctggctcatgttgaaccggccacagcagtagttcctgatcttagcaacacaacacgtgacagtagcagcagcaacaacaacggttcctcagatgatgatttgtccaagaaaacaaactgattttattttaatctagtatcagggtgttgtgttggttaacctccttgaaggccttgatacattgatagagcccggtgctatcaggggtaaacagcagtgatttctcaggatactgtgtaacaggcaggaaggctttgttttttcccctccactgtcgcatggatctagaccttctttttgttatttttttttcagttcgatgcgttttgagaatgtagtcaatggattttttgatgc

SEQ ID NO: 460551 - DNA, 325 bp, Sorghum bicolor
aaagaagaataaaactaaaaacaaaataaataaagaagacaaaaataaaaataaaatacataacagggacgtagaaacacacacaagacgggcgtggtcgcttttaatttcgcactatcactttctcttttttcgcgttcaacttacctcggtttctcatatgatgattcttctaaaaccccactgtgatcccattttattctcctatcttactgtccttttggttcacctacctttatgccttcgtagctttatcgcattcggctctatcacctgtttgccacatggattgctcactataatgtgccatacgaacgcccttttt

SEQ ID NO: 460552 - DNA, 347 bp, Sorghum bicolor
cttgttgtctttcttgcttttttttttttgtgttttttaaaaccaaacaaaaaagggggggggcccttctaagggaacaaatgttaccaccccggagaggccagaacaaatcttttttaagggggccccaaaaacaaaatggcgggcggggcgttaacaaacgcggagcaggaaaaaccccgggggtccccaaaaaaaaccctttgacacaaaacccccttttggccaaaggggaaaaaaaaaaaagggcccccccctaatcccctttcaaaaaatttcgcaacctaaatgggaaaggggaccccccccttaaagggccaataaaagcggggggggggcgggtcccc

SEQ ID NO: 460553 - DNA, 440 bp, Sorghum bicolor
cgtccgcatgagcatctcatcctaaattctcactccatactagaagcacaggaagagttcagagcagagcaggctaatatctttgctgctctggacaagctgtacatcctgcacaatgccattctagccgagtctcgcttcatcaaggccttcttcttctattgctgcattgtgttcctcatctacatgctcaccagcgcaaagcaaacgttcggcatcaggggccagctctactttggtctgtgcattacgcttctgttggagattgggttgataaaaatcggtgccgacgacttcgacaagcagttctgggtcatgtccaaggtgttcttggtccgaatggtgttcctcggcgcttccactgttcagatcctgcactccatatacacctacagggactacgaggtgctgaaccatgggctgctccagacgctggtcga

SEQ ID NO: 460554 - DNA, 109 bp, Sorghum bicolor
cgtccgtttaagttattggtttgagtacagagggataataaactcataaacctggatggaatgaccaggtttaggtcagggaaaaaaaaaaccaaaataaaattaaatg

SEQ ID NO: 460555 - DNA, 462 bp, Sorghum bicolor
cgtccgcaaggagcagaagtcctcctggcaagcccgtgggagtttccaactggtgattgcatccactaggtgcaatccaattttcgcgatggtgacgaaaccaagtagaactgtagaagatggtaccctaacaagttatattatttccttttcttatcctgcttaaatccaagaatttcctggaacatcactaacttaggatatgggtgatggtctgatccctaatggtcacctgctattttgatttgacgcctgggagtcgcctgattccgtaccatatgcctgtggtcgtaggttgtaaagcgttaaaacttgactttgctagtatacctaatgctatgacccaacctaaacaagcgcattgggatgaattttggacaaaaccatggacaactgatattttaatgttatgtacaatctatgtcgaagacttgttgtaaatgctgcccgcatggttttata

SEQ ID NO: 460556 - DNA, 414 bp, Sorghum bicolor
ctctaaatggtccacgctacgaaaacagtaataatggcccaacgtagtaacagcatcgtcgcagagctcaccgtcgtcgtcgccctcatgaccgtggctgctgcttttgtaccagcagcaaccatgtccatcgccgctactggcggcatgcagaaggaggcgaacctggtacctgcaggaggcgcagaatactctacggagggcagtgccagcaccttcggcatgcagaaggatcaagagaccagaggcaacaaggaggcaaccctcggtgaatctattggattgggcaagaatgccatctatgggtaaatcattgtattagtctgcgtcagaaggtatgaaaataatgcggatgcgctgaatcaatctcaactgagatgatgacaataagtcaccagtaggaaacaaaaaggg

SEQ ID NO: 460557 - DNA, 388 bp, Sorghum bicolor
acgcgtacgcgtcagtctgtaactgttggacacgtcgagtacgactggtcgcagttaaagttgaaagcttatctggattcaccaactctcttctaacgccccacatatttccacagattatcttgaatgatccagttgagaagtatatggttccatttcaagaatctcgaccattacctgcagacttaatcttgcggaaggctgtgatgcgattcttgaaagatcgtgcagttcctcttgtcgatgattggggaggtgtgttggcattgttcatcgtgatgattgtaccaagctggatgcacctcttctatcgatgtctagagggccacctttgtgcgtgcctacttcaaccaccgtggagcacgtcattgacctcctcctcagagag

SEQ ID NO: 460558 - DNA, 368 bp, Sorghum bicolor
  unsure (1)..(368): unsure at all n locations
cgtccgcaaggatctatacgcggaagaggctgctgcccaaagagaaagggagcgccaacgaatgcttgccattccagggctcattgcccctagcgaattgcaagacgagatggtagattcatagtgtttcttgtcgattcagctttcgctaatgtagcttcctgtttgttggtctggcctcggaatgcctctggagccctcgacttccaagtgcccgagttttcttacagggtggtgaaagaaggtgcctgctgtaattttatttttggttacctncacatgacgctgattccaagatttgtggtagtagacttgggaacccgactagtcagtttgccgcangaggtgtctgggactgttgctgggtc

SEQ ID NO: 460559 - DNA, 368 bp, Sorghum bicolor
cgtccgttttttttttttttttttacaacatagatcaatcacttttggacaaacaaaagtccgaccaagacacagtatgacaatttaacataagtccaataaggaaagcagacaacctaccttatgcgcctgtatgagtacaaatccgtagaacaggaatagaaatgtgcaaggtttcacagacgacaatcacagtaacaatattcattgttttcagtatggtcgcgaacgcgaaccaccaccctggtttctattgggtccatggcccccaccatctctgtaactatccctgcgtccaccaccaccatagccaccaccacggccaccgccatgcccataagagggtgctgctctgggtgctgatttct

SEQ ID NO: 460560 - DNA, 122 bp, Sorghum bicolor
cgtccggctatgtctagttatttacatgatgaggtgggaactcactgagattgataattcatgtaggattacaagaatattttaaataaatgcatcacaagcaaaaacttgtagagtaaaaa

SEQ ID NO: 460561 - DNA, 275 bp, Sorghum bicolor
cgtccgcacgagggctcgggctcgcccctccgccccctcaccctcccgccgctcgtcgtccgacggcgcctctctccttcccgctcccagcagatttgaaatccgatttggaaccggagcaacaggcacgactacgttgagcacttgcgcgtcggccagagccagcccgccgatctgagccaagctgggccgccgcgctgctgtggaaggagttcgaggtgctcggcatccacgtctgccgcgccgagcccgtgttcccgccgcgcccagggtac

SEQ ID NO: 460562 - DNA, 439 bp, Sorghum bicolor
cgtccgctcgtatatgcagttcaaagaggtgctggaggccacaaagcagcagcttgagagggagctctccctggaggatctcaatggcatccatgacctcccagcctgcaacctcttgtacaaatagtactggtagttagactattatgatgcagtcagagcaaaaaaaaattgaacaaaaaaaaaacatgatgaacagattgcttcataatcagcagcagcagcatcagcctgtaatgagaagggatacacatctgtggttgacagaaacacgacacagttaattttgccgaggatcaaagcctacacataccatgtatatatattaccgctgcgcgtgtatataacaccggcatttctacatcaattattatgtaagaacaaatataaagtagttagcccttttattaattttttttatgaaaaattaaattaaact

SEQ ID NO: 460563 - DNA, 85 bp, Sorghum bicolor
gccagctgatgcaaggacgccctgacggcattacgcggggtggggacccagggacgtcatgcaggcctacgccgtctttgttttc

SEQ ID NO: 460564 - DNA, 259 bp, Sorghum bicolor
  unsure (1)..(259): unsure at all n locations
cgtccgnnatcccgntcgaccccgcgtccgcaaaaaaaaaaaaaaaaaaaaaatataaaaaaaaaaaaataagggacgcatacattaaaaaaaaaaacttaaataacaaagggggcgggatcatatacaattacctaaataaaaaaaggctggccggctctccgctttcaggtttcctggcttttccttgcctcttcccaactttcccttttttattcggttccataaattcgccctctgtccccaggttcaaacctga

SEQ ID NO: 460565 - DNA, 389 bp, Sorghum bicolor
cgtccgcacccattggtcccatgagacatatcgattccccttacaaaaaagagagctactttctccgcctgtgtaaggcagtaaacttcctgtctgtcaagataggctgttctgatgttggctacccaatccatgtctatggcactatcattgtcagggacagcatcgatgagaggtgtgtttatcacttccgccgcgacagtgacaattgccaactcatcagttctgaggctgaatcactgatcttgactgggccaaaacgcggccttgcattggcaggagatatctatgtggagactgatctcaagatgaaggatgacctagtccaggacagagaacttagtaaaggactgataatcatcaggggcacaccaactcgtctatttgag

SEQ ID NO: 460566 - DNA, 390 bp, Sorghum bicolor
cgtccgcgcacgcgtccgcgcagcccgctggtgatccacgacgacgaggaccagcagcagcagcagcagcagcagccatgttgtgctgcgacctgtccaccgcgtggttctcctcggcgctcgccagcagcgactggagcacacagtggcgcggaagctccggcctgtgctagggcctcgtggagcagtacttgctaacaaagatatcaaccggcatgaacacctttaaaagcacataataaatgaagctcgctataaaaattgagggctcattcaaggcattgttcgcctatatattcaaacactcttcatgacactatgtagaagatctattgcccgtgtttgcttagatgtaatcaggaaatatgacatgggtcctacttcagaacc

SEQ ID NO: 460567 - DNA, 395 bp, Sorghum bicolor
cgtccgaaaaaaaaaaaaaaaaaaaaaaataaaaaaaaaacaaaaaaaaaaaaaacaaacaaaaaaaaaaaaaaaaaaaaaaaaaaaaaaaagggaaaggaaaaaaaaaaaaaaaaaaaaaaaacaacaaaaaaacaaaaaaaagggggggcccctttaaaagaaccaaactttacatccccttccttccaacgtaaaagtttttttatagggccaccaaaataaaattcacggcccgccgtttaaaaacaccgaaactggaaaaaccttggcgtacccaaactaaatacctttgaaaaaaatccccttttccccaattggcaaaaaaacaaaaaggcccaaaccaatcgcccttccaaaaattgccccaacctaaatggcaaatggcacccccc

SEQ ID NO: 460568 - DNA, 348 bp, Sorghum bicolor
cgtccgcgcacgcatgggcgcaatgatctgagcgatcatcgacccaggcgcggacaccgtgcgcgtgctgctcgacagtgtgctgatacggcctggagctgcaacagaacgtgcaggacaaggtgcacaacaagcttaaccggatcgacggcccgagcgagtccgacaccgactcaaacacatactcactggcgtacatcaaggcagtaatgaaggaagtgctgccactgcacccgctgtgcccactgctgttctgaccgcaggtggccacctcagacgtagaacctagcgcgcacctgaccaccgccatcactaacatcatggctatcatgtatgacataacccact

SEQ ID NO: 460569 - DNA, 374 bp, Sorghum bicolor
cgtccggcgcagcccagccgaccagagagagacagacagagagagaggagcagacctgcccgtcgcaatggcgatgccgacgaagcccggcgacccgtcgcagcgctcgccggggcggagccccaacctcaacctgccctgcccgctgccgccggtcccgggcggggcgcctgcgccgccggcgcagcaccagtcgggcgccgggctgcccccgacgcgcgtgggccaccaccgtcgtgccagatctgaggtggccttccgcttcccggacgacctggccggcgccggggccggcggcttcgatgagatcggcttctaggacgacctgttctccaccttcatggacatggacaagatcgccggtgccgaccgtg

SEQ ID NO: 460570 - DNA, 323 bp, Sorghum bicolor
cgtccgacctcacctgcgagtcgctgacgttcagggtgatgaccggcgaccaccgcaaggccacgtcgtggcacgtcctccccgaggactggaagttcggcgtcacgtaccaggcgtccaagaacttctaatgagtagccatcactctccctcttcttcaacctgacaaccgcctgcatcgcaagcagccatgcaatgcatgcatatatatttgattctttcgctgatcatgccctcagatacacggtgccggagtttaaatcttttttctttgttgaaaatcaatgtgcaaattcaaatgagaatggtcattttaaccaaaa

SEQ ID NO: 460571 - DNA, 349 bp, Sorghum bicolor
tttttagaaaatctaaaacttttcacacaagcagcataaaactacaagcactacagtcgtctacaaaccatcagttcccagcacatcgaactccaacgctatggcattattctcaactctccgggtagacacatatcacgccctcaccgacatactcactcccgagcgacggcgaccagttgcttgccgacgttgcggccggtgaagagcccgatgagcgccgccggagccttctctagcccatcagcatcttcttactatatatatatgtggttaggggagcaataataaggattaaggaaccaaccctacatatgactggttcgcgaggatgatgatgatatattta

SEQ ID NO: 460572 - DNA, 485 bp, Sorghum bicolor
cgtccgggcttctcgacctcgagagatactggtgaacgatgaaggaaattgtgaggagataagcattgcagcacaaccatcccaaagccaatttggagccttctgattgacaaatgttgtggaactaaccttcagcataggagcaagaaaaaatgactgggaagagaggttttttggatgcaactagcagacatctgggagtaacagaagagagctgggaaatgaaggaagctttagaacaaggaatgtttctgaaacttttttgttttggaaaacactttctgaaaatgtgtggtgtacaagaaaattccagggaggtgaaattgctttgctcactgcagcgggaaagggaaagagaaacactagaatctggtgtccagtactatgtgttcttttggttctgtctagtctaaattcttgtaacaagctttcctatgatggaataatcaattcagcaattccaccgatgattactggttagatca

SEQ ID NO: 460573 - DNA, 344 bp, Sorghum bicolor
  unsure (1)..(344): unsure at all n locations
cgtccgtacataatcagagggaagctctaaggagcctgtggaacattctctatggaacggggctaaaccagaagcagattctaaaattggctgcaaagcaagggttaaccgtagagggatgtcctttgcctagctcaagcccagatgttaccacgccaccttccttttcacctcataggcggnttccatcgtttatgtcatttcctagtccgcagtcagagtcttactctccgtctgcttgctttttccaacatggtttcagcactatgtctttgctgaaaaatcagcatgagacacccaccatatgtaggcaggagcacctcagttcttactacatgatgtct

SEQ ID NO: 460574 - DNA, 337 bp, Sorghum bicolor
cgtccgctctacttttcttctctccctcatgcatacaccagagaaggagaacctactacatctcctccccatcctctaccatggacgccccttctttcccctccaaaatcctctcaattctctccatcaaagagcagctgcaatttgtttcaccgctgcaccattcattttgaagcgtaaacatgttgattgcgttgtcgtcatcctcttctatatagagctcatgggttacaaccaaggaatcattttcaccgtcccgggtgaatgcttgctgccgacatcaaaatcaaagatcaacccatcacccacacttgatcttgcagcaacgtcaccctca

SEQ ID NO: 460575 - DNA, 382 bp, Sorghum bicolor
cgtccggctggttcttggaagccacagtcgtgggccaatacaaaggttgtttcttgggagcgtcagtaactactgcgtacaccattcaaagcgtccagttcttgttgtgaagaaccaaggctgaaggttcctgttcctgaacaaatcaactccctggtcgtcctaattatgttcggggtatttatcaacaaatatgtaagaagtattactttagccaaacacattggcaaataaaatagcttgcttctgggagggccgaggatggcaaaggaggggttccttttttttccttgtcagtttgtcttgcttccggactggcatatatacgttatggtctcgcagggttgtaaataagaactagtatgaactttgtgcgtgtttt

SEQ ID NO: 460576 - DNA, 204 bp, Sorghum bicolor
catgcaacatcatatctattttataagtgggggaaattcaattaactgaacgtagctatacaacataatgacttaaaaaaccctgacgttacccaactaaataaactggcagcacattctactttatccagctggcataatatataatagtctccctcctatcgcccttccaaacatttgctcatcctgaatggctaatggtac

SEQ ID NO: 460577 - DNA, 293 bp, Sorghum bicolor
  unsure (1)..(293): unsure at all n locations
tcccggtcgaccacgcgtccgcccacgcgttccgccgtagcttccgtccgnnacgccgcgggccgacacgcacccgctggcctgacccgctccggcctgcggcgaggacgccgtcnccgccgcgcccacggcggccggcgcctcgccgccgatcccgctgccgacgggtgctctggtcatcgatatcgagggggcgccgnctttacctgcggaggcggcccccgtgctttggtgccggatcttccaccttggcctcgattactactagtcggcggtgccattttccgaggtga

SEQ ID NO: 460578 - DNA, 147 bp, Sorghum bicolor
taacggataacaacacaacacacacaaagatgaacagacctgaaagcctgttttatgggatttcctcatgaaactgtcaatggaaaaggtatatcattccttcctcattggggtttaactaccagtctaccaccttattctggtttc

SEQ ID NO: 460579 - DNA, 187 bp, Sorghum bicolor
cgtccgaaaaaaaaaaaccataaaaaaagttatgctaatgatagaaaaatactactcaatgccaatggcctcatttcaaatgtatagggattctgtggtggaggttccagtttatctaatgtgatgggccggcgccttaagggtataaaagcttctcacgagtgcatccaatggatcaactttttaa

SEQ ID NO: 460580 - DNA, 357 bp, Sorghum bicolor
cgtccgggaaaggctcaccctcgaagccgcatgcctagtgccgcctatttctgtctgcgttcttcctccttgcatggaggtagtagctgtttactgcatggtcgttgccgccgtagtgcttgataacaacggggccgacacggtcttcagcactaccattcgtatcgtaacagttagcattgaggagagagaagagatcaatggagacgttcccacgatcacctcttgcgcacgcaacgaatttgagttgttcaccactgccgcgtcctacaagagccctatcactcgcaagaagcgcggcgcgttcgcccttttcatggcgatgtttctgtcgtttggtcggagcgacagcattaa

SEQ ID NO: 460581 - DNA, 501 bp, Sorghum bicolor
cgtccgccaccaccaagaacgatcaccggagctgcgacgatgtatccgagcgacctcatcggagggctggaccgcctgaggcagcaggcggcaagagccgcggcctcgactgtctcgctggccaagccagcggccggcgccgcggttgcgggtctggcctcgaccgtctctctggccaagccggcggcgggcgccgcggtggcggggctagcctcgaccgtctcgctggccaagccggcggcgggcgccgcgatggctgggctaacttcgaccgtctcgctggccaagccggcggcgggcgccgcggtggcgggtctgggttcggtgacgcgtcacgctgcggggatggtgtccacccgcgagggggcggtgaagaccgcggcggtggttttttcgggcgccgctggcctactttctgtggcaacggccgtcgttgtccgttcgccgcctgcgcgtcatgaagggcctggcgccgagtgttcttcatttccgaccgcgttc

SEQ ID NO: 460582 - DNA, 297 bp, Sorghum bicolor
cgtccgctttttttttttttttttttttttttttttttttttttgggaacgaacggatgatctcgtcttccgggaggaacgaatcctttccttgcttgtcaaaattgtacccttttttctttaaaaagaaaacgaaccaaaggcaaaaacaaaaaaaaacgaatctgtgcacggttaccggcgacggatttgttgagctggttcgatcgatcgcttatccttgctactaggcgaggagcatctggaagagcatgtcgttccagatgtcgatgggtccggggaggcaccaatggatgc

SEQ ID NO: 460583 - DNA, 231 bp, Sorghum bicolor
cgtccggtcgaacgcatggatatagcagtatctgagaaaagaaaagaaaaaaggaaaagaaaaatgttaactgctgtatctgagaaaagaaaaaagcaaaagaaaaaatgtaacttacagtcctgtggctcttctgagtgctggattcttgcaaaatacaatcccagtaccaggaatataaaataacaaaaaaaggcgttagtaacaaaaaaagcacaatcaaatgggcgg

SEQ ID NO: 460584 - DNA, 330 bp, Sorghum bicolor
gggcagttcttataagacaggtcctttcaatggggcaatacaacaacaatcaagagacaacgagtactttcaaggcatgacaacaagttaccaaagggcgggaaatgaaaggctgtgagtataaccgacagttacaccaggatattctacaatgacatttttaacagattcaagcatccagcaaaaatgaccaagaccatcaagtggacagcttgaaaacatcgatgtatcttcaggatagacttttagacagatcaggggagttatcattagtctagaggatcggaacccattctagctctaactccatctcacctgattctacgttct

SEQ ID NO: 460585 - DNA, 497 bp, Sorghum bicolor
cgtccggtgtggtagagaaatattaaatataaatagtttgctgtcctacatgcatttttacatatatttatgttctttctgcaaatgttagtaataacaaagttgtaggatatggaattctctgatctttggttaaatttcataatttttggacttaaggatttgggtatatgaaaatgtgaaccttgctctctcaattctcgagcagattctgaggtctgttttcaactatgggttaggctatcttaaaggcatggtaaaaatatgtcttctttatgaaagttgtagatattagtctgtaggttctgaaaatgattttggtttatggattaaaagatataaaaaggtgaagtaccagtgctgcatttgacttggcactttgcatgttgtttggcttgtatgtcgggctagagaatatgagtgcttcacctacttgtggtatttggtaaaatgagttctctctctgatattataatacctaataaacaggtggcaat

SEQ ID NO: 460586 - DNA, 64 bp, Sorghum bicolor
  unsure (1)..(64): unsure at all n locations
cgtccgaaaaaaaaaaagcgcacagnaaataaaaaaaaacacaagaaaaaacacacatacatgc

SEQ ID NO: 460587 - DNA, 377 bp, Sorghum bicolor
  unsure (1)..(377): unsure at all n locations
cgtccggttgcacatgagcagttcgagagcagacgtgtgccagaggactgaatataggcgcagggctgtacctgcacaatacatatacattccaaaggaggcctgaataaaccactgggtgctcatgcataacttgacatgaaggttggaaggaaacgcatatgcaactataacgctcttgcatagttacaaaactagcaggaaacaacaagcgcgctcttgaaacatagcacaattgtgcggcttacactagatgggttagaaacaaaatctaaatgccaccttaaataccattatcctagtgcacgaattcgttccgtgtacattcttgtgacgaactgcataaagtttttttactaaatcatatattgttnttc

SEQ ID NO: 460588 - DNA, 457 bp, Sorghum bicolor
  unsure (1)..(457): unsure at all n locations
cgtccgcggcgtcatcaagcacgggtgcaagccgtacgcgcacaaccagtgccgcaaggggaccccgctcgcgggatgccaggacctggagtgagccggccggtcgcccggaccccgccggagctgggatttctcttctctgctctccctctccctcgtcggcctctgctctctccctcgtcggcgtgcggcggcgcacgtgtgcttttcgcgtcccgatcgtggtggtgtgtgtgtaagcacgacggtgcctggtgtgtttagctatagacaaaagtacggccgcgtaagcacgcgcggttgatcttgagcagttaagcgtgtacgaaatgacagctgtgtacgtgtactgtgtctgatgaagtgtgggatgtagtactgtgtatttggtatggatctgatgtatgaaaaaggatgtntacgtactataaatggcaaatcatcatatatttcctct

SEQ ID NO: 460589 - DNA, 399 bp, Sorghum bicolor
  unsure (1)..(399): unsure at all n locations
cgtccgcggaaatggcagtgaccgccgcctcgccttctggcttgtcgtcgatctcgacgccatcgacgaagaaaatgcgcttgcagaacctgttatgaccacggctgtacctctcgttgcagttgaagcataggttttggcggcggcgttccgccatttcttccggagagaggcgccgctgtgttccctcgccccgacccggctgagaggccaccggaggtgctggcagctgcaagatcggtggtggcgccggtagtgcaggtcgtggtgctggcgccggaggggtaccgcgcggnggcgcccgaggggggtgggaggcagcctctcggcctccatcatctccacctggcgtgcgaggctcatggccgccgccaacgtacccggggttgtggatgcgga

SEQ ID NO: 460590 - DNA, 371 bp, Sorghum bicolor
cgtccgattgcagtgcaatcggaggctggatttccggtgaaatcagagggaaataattgatttccgtgtggatctaggccccgccgccgcatgcattttacagctctagtctaggatgctggtgcttttgtttgccagcgccggtgcgatattcttgctggcgactcactcacaggccatttatttctttgctgcaggctctgcttcacagcgtgacaagcctggcgaacaagctgcacccagtcgtcgacgcggccgacgggtctcccgcagcgctcgaggatgctggcggccgacagctatgccgcagctctcgaggatgctggcgggcgatacctatgcaccggcttcactgacgacgtcgtggagct

SEQ ID NO: 460591 - DNA, 451 bp, Sorghum bicolor
cgtccgaaacgtgattacagttatgtgctttcacttaaaaaaaaaaagaaaaaaaataaaataaaaaaataaatataaaaaaaaaaaatataatgcatatttaaaaatataatataaagataataaaaattaaaaaataataaaaaaaaaaaaaaagggcccccttttttccgccccaggggaaccccggccttcccccctttggtgtgaaccgggcccttgcccatggggtccaaaatttcccgggggccctttaggggcatttccccggatttcccttggcgttccccgacgggggggaccttttggggggcccccccgggcttccctgggaaattcccctcccccggttgggccgggggaaaaaaaacttccctttttttttcccacccttggaaccccggaagtttttggggcccttccagggccgtgttttggaaacccccccccg

SEQ ID NO: 460592 - DNA, 541 bp, Sorghum bicolor
  unsure (1)..(541): unsure at all n locations
cgtccggactgccaagaggaaagcctgcccaataaatacttagaatatctttcatgcatctccaaggacatagaaacattttgctggtgcaagcaaccaatggggaaagtagacatcgatactagcagaatggaggaatactcacacagctatactgaaccgctgatgttgactggtgacacgaagagaggttgtacaagggatactttcagcagctataagctgcaagtgcttaccgtgctcaaaacaattgctataaactgcaacagcttaacatgctgaacacttgagctgaacatttgtgaagcttacagaggaggatcgggttcttggccagctgccatattccggactatggattcaactgtgcttcagtgttgtcttttttggataattcgaatcactttgattcatttgaatcagagaaataagattaaccctatattacctcaaaaaaaaaaaaaccccgccaccagccctaggctctgtttgaatgtaaaacatttatagattttttttaaaaattaccatggtntcttct

SEQ ID NO: 460593 - DNA, 119 bp, Sorghum bicolor
ctaattactgcacattgctctacaacatacacgcatgggatatctccatcctgaaacaccttaatccgcacgacgcacattctctttacatgcgtttgggtactaacaaatagtcccaa

SEQ ID NO: 460594 - DNA, 53 bp, Sorghum bicolor
cccggtcgacccacgcgtccgtaaaaaaaacaaaaaacgaacgatctaaaaga

SEQ ID NO: 460595 - DNA, 503 bp, Sorghum bicolor
  unsure (1)..(503): unsure at all n locations
cgtccgcgctgcacaaggtggaggggcgagcggtgcactaccagatcggggacagcgacggggaggtgaggccggacgaggaggcgcagtacctgacgttcaacgggacgagcctggaggagctgctggagaggctcaaggaggagacggggctccacgacgtcatcatgtgctcgcggagccccatcaacgggaagctcctgccgctccgactgcagctgccgccaaacaacgccgccgtgcatatcgtgcttgtgcaccagtcgtccaaaggtacatatatacggtttagttcctcttctatacataccataccattgcatcggatcgacgacataacacaccagtcgtttttttttccttttatttacaaaactgaaacacaccatatttgtatttcacacatgcactaaacgaagagaactgttactgatacctcatattgaaggaaacttcatgtagtgtagacattattagtagtattgattacctncctttcattt

SEQ ID NO: 460596 - DNA, 132 bp, Sorghum bicolor
tgcgtgacgtagctggaatacactgtccttctcaccacaacgggtatactgggcaaactgctgaacaccccatatgacgcttcttgtcaactatcctgcctagtgctagctggcgtaatataataacaggtc

SEQ ID NO: 460597 - DNA, 301 bp, Sorghum bicolor
acccacgcgttcgttcgttatgggagtcgcaacgcgacccaacgagcactccaaccaggcgtagaacgagagggccggctctatatgatcacaaggtaaggtccatgtgcaggccacactgtaactttcttatacgggcacctaaattaaattcattgggcgccccttaacaacactgcaacggggaaaaccgaaaaactccccaacttaataaacttgcggcacatcccactttcgccagttggagaaatagccaataggccgggagccgtcgaccttacaagagccgcacagcttcgaa

SEQ ID NO: 460598 - DNA, 61 bp, Sorghum bicolor
cgtccgaaaaaaaaaaaaaaaaaaaaagctgacactatagaagaatcaaactaacatacgg

SEQ ID NO: 460599 - DNA, 342 bp, Sorghum bicolor
  unsure (1)..(342): unsure at all n locations
cgtccgtggatttcaaggcacacttgaagagcaaggctggtttatctgattagaaggcttgtctagcaaccatgagctttttaactctgtatcacgaagtcctatttttccagtagcaaactatcggagatactgctattgtatcggattccttaagacatccatagcagccaccagccagagtaccttatactacctggaatgtttatttatatatttttttgaaatgctattatgtgttctgtaagttttgtagattttggaagtttggatttgtcaaagttactggattctatgatccttgtgaacatacaaacatanaattagtttcaaattcaactg

SEQ ID NO: 460600 - DNA, 183 bp, Sorghum bicolor
cggtcgacccacgcgtccgcccacgcgtccggaacctgaacctgaacctgaacctgagcagcaggacaacacggtggtagcggtggtggaggaggatctgcttcctgaatccaccatggccgacgaggcacctgtgagaggagtgaggacgccaccaaggagatagctccactcaattttaaa

SEQ ID NO: 460601 - DNA, 483 bp, Sorghum bicolor
  unsure (1)..(483): unsure at all n locations
cgtccgcggcaacggtggtgacggatctgccttcctcgcccgcgactgcgcgacagcggtggcggggccctccctcccagccaccaggagtgccacgttgtgcaaatgcgggcggatccatctccctttccccttgactgtgccctcctcggggtctcaggccgccaccgccctacaccgcgccctcctcggtcgccccgcgcggcaggtccctgtggcggcagcaccagcatcccaacgccctggccatggggtgggggccggaccaaggtgagcgggaggcgcagatccgttgcatgttcgccttcttcgacaccgcgaaacacgagcaactccgctaggcacagatccagcggcctggagactctgcactngggtccaatgagatcgagtcgtcgttgtccccgactctgagagccccagcgtcgccgcccctcgggccctcctgttctgggtgcatttagctgacgctgtctgcacgtc

SEQ ID NO: 460602 - DNA, 334 bp, Sorghum bicolor
cgtccgggcacacattgagctgaatctgtacaacataagcctcaagtacacctctgcaaccgtggcatcggcaacaagcaactctgtccctgtggtcaccttctttctggcagtcctgttaaggctggaagtggttcggctgagaagcccgtcaggcatggcgaaggcggcgggcgtggcgctgtgcctggccggggtcctgaccatcgccctgtacactggtccctcgatgagcccggtgaaccaccaccgcgccttcgccgagcaccatcctcaagctcatgccgatggcggcggcggcaaggggacatggatcaagggcacgttcctgatg

SEQ ID NO: 460603 - DNA, 238 bp, Sorghum bicolor
cgtccgggcggcatcggcggcggggcgggcgacgacgagccgtcgcccaacgtgaagccggtgcccaccatccgggtcaaggtgaagcacgccggcgtcacgcacgagatctacatcagctccgaggcctacttcggggagctgaagaagctggtggccgccaagacggggctgcacccggacgaccagaaggtgctgtacaaggacaaggagcgcgacttcaaagcgttcctggaca

SEQ ID NO: 460604 - DNA, 204 bp, Sorghum bicolor
cgtccgctctcccttccatcgatcgatcgcctttcgctgttcgttcccacattttcttgattattactatcgtttatttctccgggtgggggtcgatcatgagcaaccaaccaaccatggcggcgacggcgcccgtgcgcgcgtgggtggtggtgctggtgctggtgctggcgtgcgcgctgctccagacgcggccgttcgacg

SEQ ID NO: 460605 - DNA, 222 bp, Sorghum bicolor
cgtccgatgccggacaacgacctccgctgcggcaaggtcgtggggctgccgctgccgccgtcctactccgccgcgcgctaaaatgaccaagcaggcccccggcccctcgtgttcggattcctgtgtgttgctcctgaggaatttcttttgctttggcgaaaataattaagtagccgggccgcgcgtgcgcccctcaaaaaaaaaattaataaaattaatagg

SEQ ID NO: 460606 - DNA, 438 bp, Sorghum bicolor
cgtccggcaagttatggtggctcccaggcacttggaggaggatatggggcttacagcggatacagtgctcgctcctctggtagtgggttatctggtcatagttctcttcactatggaaagcgtcatggttattaggatttagattgcttgataaagcagctctgctatctgatggacctgttcttttcacctttgccccccccttctcccctcccgtactaaaaacagccaagacattgaagtttggagcctgcttattggtgccccttcccaaaccagatgaccaagagagcccattctgtaagctattattaagaggacctatgtggatgccatagaccacctgattttccttacactacattactcatgtcttcctctgggcctatgtttttagcccttcccataaatgttctaaccttattatttgaaaggttt

SEQ ID NO: 460607 - DNA, 295 bp, Sorghum bicolor
cgtccgacaacttttggaaccggtcttttacacactgtgcacctgagattgagaaactgtttgagtcggtggcaaggtcctgcggtgcaaaagctgtagacgaaggaatcagtgtgcatgatggcagtcactaaagttatttgctttgttgaagtgttgtttttgtactatttcttctgtctggcactgtaaatatttgcgtgctgccctatctgtgcttgtacagatcgtctgaatagtaaataatgctggaaaactgtcgtgcgtcttgtcagcgatttgggtgcctgtgctt

SEQ ID NO: 460608 - DNA, 78 bp, Sorghum bicolor
cgtccggcgtggcgccgctggccgcctccgcggacgccgtcgtcgtgcagtccatccccggcgccggagccgtcggcg

SEQ ID NO: 460609 - DNA, 136 bp, Sorghum bicolor
cgtccgacggagttgattctttatctcgggcttttcggttggtgagcgtggtgcgttgtctgtcgattgtctttggctgactggctggttcaagaggacttctgaaaacgagatttaaaaagttcgcatgcgcgtt

SEQ ID NO: 460610 - DNA, 438 bp, Sorghum bicolor
cgtccgggcagtttgcagccgcctataagacgtgggtcgatctgctcgatttgattgacgccaagagcggcaacatcaatatggagaacttcatggttgacaacacagtgagctctgcagtcttatcatacttagtgacaagaccattgtcggcggcggctacggatggccccaatacgatcagtggcatcttgaacggggtcatcgagcaaaagctcaggatcatccccaacaacatcacgtgaatggctccatctttcgttcttacatgccacaatctcaaaacttgaagacattactacgcgcatgcattgatcagtatctatgtttcattgtttcctgtccatgtcgtcctttgattgattgatctacttactgttggcaggtggcaagctgtgtctttgcaggtctttgacgccttcaccaatgcttcatgaa

SEQ ID NO: 460611 - DNA, 397 bp, Sorghum bicolor
cgtccgcaggcgatggccgacgacctccaaacaatccaaatccccctgctctgctgctattgctgctgtaatatttttgtaaatataggccccgtccggcccggcgacggaaggaggagaaattaaaccacaaccagccaaccaaaaaaaagaagaacaagataagggatggatgacggcgatcgattccatagatgtgatgatgatcctccgttcttgcaagtttgcattttttgcagaagggagggagatcatcggatcgaacgcaatgtactaatccctgcttgtttgcttagttttctttttttgatgattactactactagtcgtccgtcgattcttgtgttcattcaatcactgtacattggtacgagtaaacactcaagaacatgagaat

SEQ ID NO: 460612 - DNA, 155 bp, Sorghum bicolor
cgtccgaaagagagttcagaatgacatgttatttgtttgaacatctagccccaggattcaaccctggtcattcagctacaatttactgagcatgccagtgcaatgcgtactggcttagttaagctccacgtcgatgttattttgtgtacccgtct

SEQ ID NO: 460613 - DNA, 349 bp, Sorghum bicolor
cgtccgtccgcgtcccgcttccctttcccccgtaagaacccaccgcacggcggacatcacgatccccaccggccggcgtagcggagatcgcgagttacaacggggaagcgaggaagctccctcgatcccatcccacgcagattcgtttgggtcgcggtcgtggtgaataaattggtaggtggcaaggggagaagcggcgatgtcgggcgtgttcggcagggtgttcgggaagtccaaggcgcagagccaggccaccgcgctggcctcgctcgacaagctcaacgagacacttgaaatgttggaaaagaaagaaaacttactagtgaagaaggccaatcttgaggttgag

SEQ ID NO: 460614 - DNA, 451 bp, Sorghum bicolor
agtaatgacataatatgatagcataattatgcttcgagttcagtctctcagcatatagtaagtttagctagtcagttctattacagaactaggcaatataccgacggagacgagggactctgaaaaactcaagtccgttcagttcaccactccagctaacacagaaatggcagttcatagcgccatgcatatcgatacggatacagtaggataggacaggacaggatagttgccatcgccctcggcgtgggaatcccacgcttgggcttcttgagcttcacttggaaagcccgccgttggagtgatcccacggccagacgtcgacgccggggccgccgcagctcgtcacctcgctagccatccggttctccaggctctcgaggctggcgatgctctgcagcggcgagttctggagctgctccgtcgcggacagccccgtgaagcacgcttt

SEQ ID NO: 460615 - DNA, 221 bp, Sorghum bicolor
  unsure (1)..(221): unsure at all n locations
cgtccggccgcggcgggcgggcgtgctagcggtagcagcgagcggtgcgcgagggcggaggaggcggaggcgggagggcagatccggggggcggcaaatctggcaggcgccgcggtggggctgcgggcgcgggggagggcggttgtttttttttttttttttnttttttgtttttttttagtgttgttttttttttttttttttttttttttttttttttt

SEQ ID NO: 460616 - DNA, 175 bp, Sorghum bicolor
cgtccggtctgctgcacctctaagaagactacgactaccaacctctccggaattacatgtggtctgaccgtctataaagatcgcctcagggtggaacgtgaacgccaaggtcgtgttcaatactcgtctacaagtactggactaacaacttgcacatacaggatgattctacaac

SEQ ID NO: 460617 - DNA, 144 bp, Sorghum bicolor
ttcaacagtgccagctgaggaaggaccccctgacggcataacgcggggtggtcccagggccgtcatgaggctcgcgtcttgttttctctttgagtgcgttccgagttatgggtctaggtcataggttacgactcccaaactgta

SEQ ID NO: 460618 - DNA, 293 bp, Sorghum bicolor
cgtccgcacccacgggctagccgtactggcctgtgtgatgaactggctggagatactagagattgagatgagataatgcgagcgagcgagcgacagggttaattggttcatcagattcagaactcagaaagacggctagctgctaggctctctgtctgtctctactagatctctctgtgtgttgtgtgtgtgtgtctgtaatcgattcccatcagcttgctgccgccctgtgtgtcctacagtagtagtctgatgattgttttcactgctctagatcgatggcctgtacctca

SEQ ID NO: 460619 - DNA, 423 bp, Sorghum bicolor
  unsure (1)..(423): unsure at all n locations
cgtccgcccacgcgtccggcaacctccacctgtggtcatggaaggctggtcctcacggcattgcggaatgggtgcaaggcagggtcgtaaagctgaggatgctgttccccattcttaacccactggcctcactcaatgtgattggcttccaagagggcacagataccattttcattagtatagatatggatgtcttcgcagtgatgctgaggtcggagcaggtgaagaaggtaggcaagacggggtccaaatatgccatggcaccctatgtgagcttctacactccagatcttgcaaagggcagattgctatcaccatgaagatgcagtgatccatccattaacatgactgtggtactattgactnttcaaggagatgatgagtcaagtgttttgttttcagtttggatggtttatggaaaaa

SEQ ID NO: 460620 - DNA, 340 bp, Sorghum bicolor
cgtccgtgcgcctccggccggccggcgtcgcaagacaggccagaggaagaggcgagtaattaagacttcatcatcaaggtcgacgacgactgatccgtacgtctcctccgatccgatcgatcctcatgaagcagctatagcaatgcaacctttaactcgatcgatccatccagctttctatatatgattaatttgttacatatatataacttatttgtatgtaattgtaccagtagcaatccacacgcgtgcgccgcatgcaatgtaccttgaactattcatgcgtacgcacggtgtataggaaacgtacgtaccttagcagacaaaaaaaaaaaataat

SEQ ID NO: 460621 - DNA, 295 bp, Sorghum bicolor
  unsure (1)..(295): unsure at all n locations
cgtccggnggatcgaatcgaaatcgaagcgaagcagaggggcggcgatgcagatccgcgtgcagtgcgggtgcggcgagtcgtcgtgcccggagtgggccgtcgtggagctgcagggcgtggtgcagccgcaggcctccttcgccggcgacatccgctgactccacatcggccgcctctgctcctccccctccccgtccttatcttccatggcaagagatcttgcttgattccttggccctctcttggcgtcatggtttattggcttattcctaggtgctctccattttgttcgc

SEQ ID NO: 460622 - DNA, 294 bp, Sorghum bicolor
cgtccgaaagacaagagagagcgggccaaatatggcttcggaaatgtcctacgctgccgtcggcgtcgtcatcctctccgtcctcgtcgtcgtcgccgcggcgtccgcagaccccacggcggcacctacggccgcgccgtcgtcgagcaagctctcgctcgaagaggcgtgcaagcagaccgcggggcaccacgacctgtgcgtggcgacgctgtccgcggacccatcgtccaagacggtcgacacggtggggctggcccggttggccattcaggctgcgctatttttcgcgtt

SEQ ID NO: 460623 - DNA, 104 bp, Sorghum bicolor
cgtccgcccacgcgtccgaaaaaaaaaaataatataaataaaacccaatcaaaaaaaacaaacaaatctactatacaaaatcaaaaaaaacaccgagagagaat

SEQ ID NO: 460624 - DNA, 429 bp, Sorghum bicolor
cgtccgaaaaaaaaaatataaataaaaaaaaatatacaacaataaaaaaaaaaaaaaataaaaaaaaaaaataaataaaaaaaatgagagaaaaataggaataaaaaaaagaaatcaaaataattataataaaaaataaaataaatggggggcgccttttttaaaggatcaatttttcctccccttatcaaccattttttttctttttttttgggccccccaaaataaattacctggccttttttttaaaaattttggaatggaaaaacccttgtttttcccaattttatacccttgtaataaaatcccttttaccacattttgtaaaataaaaaagagcccccccctattttcttataaaaattattccccttctttattgcaattgtgtccccccctttttgcggccaatttatcccaggttttttt

SEQ ID NO: 460625 - DNA, 118 bp, Sorghum bicolor
cgtccgtaaagatatatatgtaagcaggatcatcgatggttggtatcgaattgatgatgatatgtgatgcatgcatcagaagaccttggcgacgtccttcatgagccccgggttggcg

SEQ ID NO: 460626 - DNA, 393 bp, Sorghum bicolor
tcccggtcgacccacgcgtccgctcctcctctccgtcctcgtctccgccgcgtccgccgcacggaccgtgggcgacaccgtgcaggacgcgtgcagcaagacgcagttccccaagatctgcgtcgacagcctcgcggcgaagccggagagccagaaggcgaccccgcggaagctggcggagctgttcgtgaacatcgccgccgagaaagggtccgggatggccacgttcgtgcacggcaagtacaacgacgccaaggacagcgccctgttcaagtgctacgacagctgctccgacgacgtggagggagcggtggcgcaccctaacgggctcgtccgggagcccacccgacgccaagttcctggagcctcaagtcgtggcttctcctccacgct

SEQ ID NO: 460627 - DNA, 314 bp, Sorghum bicolor
  unsure (1)..(314): unsure at all n locations
cgtccgtgggatcactggaaaagctatagaggaaacagctgctgtcattgtgaggatttaccatgacaggaaacagaagtgctgcatgccacgcatatcaaaacggtactagtattgtgttctatcccttctactacaccttgtattgtgtgcatgttttgataagctccgtgtcaagcaccacagccttttttttttatttttttgttggaccaccttcttggtggcgtttgtatcttaaagataacttgaagttttgcacagcagaaacaaatgtatattgcgtttatgaccaanntaaaaaaataaattta

SEQ ID NO: 460628 - DNA, 165 bp, Sorghum bicolor
cgtccgcggacgcgtggctgcgtatggtattgtgacacccacgtgatctgatacagaacttacaggaggctgaacttctgtgttacatacatagaacagggcgggctgtgtcgatttgccacacattgtttacttttaaatcaaaatgaactgttgttgttgcgg

SEQ ID NO: 460629 - DNA, 342 bp, Sorghum bicolor
cgtccgccacctcctgcataaacaactgggttcacgccttgctgcggcctgtccggatggacgggcagattgactggtcgattgcttgtgaggattctaatgacgatatacgtacgaatcatctgaaaatacattcctggatactggacttggttcttgatatgatccctgaaaagatcactggagagttaagagctgtcacttaaagccgcgcttacagacgctggcacggatgctgtgctgtagacgatgctgcacagtagggagcacgactccgagatggacttcgccatggcgatggacaaagagacggagaacgacatgttcatgtacatgctcttg

SEQ ID NO: 460630 - DNA, 230 bp, Sorghum bicolor
cgtccggcgtaggatggatttcacaagcaaattcagagctgtgggcaccttgcaaactcatccttttgctgcttcatttcaagtttagaccaacttctgtagagaacttttagcacagttaactagaagtcatattgaggtgtcattcatttggagttctcatttagacttttgtgtagtattcattttttcattctaatgccactcttttgtgcagtattctttttttt

SEQ ID NO: 460631 - DNA, 603 bp, Sorghum bicolor
cgtccgcccacgcgtccgcgaaggcctcgtgccttctcttcctgtctcggctcttcctccttgcatggaggaagtagctgtttcccccatggtcgctgccgccgtagtgcttgataacaatggcgccgacacggtctccagcactaccatccctagcgtaacagtaagcatagaggagaaagaagagatcaatggggacgttcccacgatcacctcggccgcaagcaacgaatttgagttgttcaccactcccgtctcctccaggagcccttccactcgcaagaagcgcggcgcgttcggcctcttcagggcgatgttcctgtcctttggccggagcgacagcattaagaagacgggcggcgacaccacgagccccaagaagagagccatcgcggctgatgctgtcgactacaagcccgccggtgacgagtcaccgtcgtggaagaacatcgtggacagcatgcgcccgctccgcctccgcgggcaggagctggagtactacccgccgccgccgccgctgggccacgccgacgtgtaccatgacgtgatcctaccaccgccgtcgccggcacggtccggcttcgagttcgagaggtgggcatg

SEQ ID NO: 460632 - DNA, 506 bp, Sorghum bicolor
cgtccggcccctccatcataccacaccatgtgatgcgaggagaggcctcctcttctgcctctcatccccctccccctacttccaagatgcaatcatgctgccccaagctcctcgggccctcggccgccatgattgcctcaccgcctcctcaagagagtcgcctccacctacttccaagaggaagaggccggagaagctatagtccatgaagaaattcagcggagggccggcagcgtacggggccggggccggccggggcagctatcggaggagagagagagagggagatggggaggtgacagaaagctagagagagagagagagagagagaggtgcatggtgcatgatgatggcgtggatgatctcttcgatctactctagtagtacatctatcgttcgatcgagtcaagaagccatcatcagatcggtgcagttctccctccctgctcctcctcctgctgctgctccttctacttctttcttccaccagctcctcttcagcttcg

SEQ ID NO: 460633 - DNA, 96 bp, Sorghum bicolor
cgtccgcccacgcgtccgcccacgcgtccgaaaaaaaaaaaaaaaaaaaaaaaaaaaaaaaaaaaaaaaaaaaaggaaaaacaatggggaagaata

SEQ ID NO: 460634 - DNA, 578 bp, Sorghum bicolor
cgtccgaaaaaaaaaaaaaaaaaaaaaaaaaaaaaaaaaaaaaaaaaaaaaaaaaaaaaaaaaaaaaaaaaaaaaaaaaaaaaaggggggaaaaaaaaaattaaccaaaaataaaaaaaaaaaaaaaaaaggaaaaaaaaaaaaaaaaaaaaaaaaaggggaaaattttaaacccaacccaaaaaaaaaaaaaaaaaaaaaaaaaaaaaaaaaaaaaaaaagggggcgccctttttagggatccaaattttcctcccccgtctttccaattaaaaattttttttttggggcccctaaaataaattacatggcccgtgttttaaaaccttgggcctgggaaaacccttggctttcccaaatttaattgtttttgaggaaatcccctttttcccagttgggtttattacaaaaaggccccccccgttccccctttccaactatttccccaccttaatgggcaatgggaccccccctttaaccggcctttaaaccccgggggttgtggggttacccccaagggtacccgttaattttgcagggcccttacccccggccttttggcttttttcccttccttt

SEQ ID NO: 460635 - DNA, 380 bp, Sorghum bicolor
cgtccggggccgccacggcttcggctccgggctgcagcaggcgctggaggagagcgagaaggccggggacatcccactcgacatcttcgtcagcgtccccgtggagctgcagctcggctccctcgacctccgccaggttaaagtcaacgtgcactgcgcgctcgtcctcgacagcatctcacccaagaagaagcccaacatcaagtccgcaacctaccaggccaacgtagagttttgattgattgttcacaatcatatatatttattatttattggatcagagttgatcaatccagggaacatatgcatgccaattacgtatgcatattatttgtctgcactgattgctcggtcgctaatatatttagggggtgctgggg

SEQ ID NO: 460636 - DNA, 486 bp, Sorghum bicolor
  unsure (1)..(486): unsure at all n locations
cgtccgcggacgcgtgggcaataatcttcaagaagtgtgcattagaggacatggaggtcacacataccctacctggctatgttcagaccactctgttaagaatttggaatgcctttgccttgaaggtgtagcctggaaaagtcttccacctctgctaggagagttgttgatggttggcgaagagcagccaagcgtcgcagagcaaacctttcagaatctaaaaattctagaacttgtcaacatagcaactctgaaaaaatggagtgtagatagccctttctctaagctagaggtactcactgttaagaattgttctgtacttacagagctgccatttgcgcacatgtttcccaacgtacaagagatatacanttcagagtgtgagaaactagtgtcagtgccaccaattccttggagtagttctctgtccaaagctaaactgcagagagtgggtaagattattgagaacttagattacagcaaaaa

SEQ ID NO: 460637 - DNA, 108 bp, Sorghum bicolor
cgtccgcccacgcgtccggtgggggaaaaaaggaactgagatacacttgcctaccaaaaggcgagatcatttacatcagtggagcttgaaattgcagttgtgttaaaa

SEQ ID NO: 460638 - DNA, 634 bp, Sorghum bicolor
  unsure (1)..(634): unsure at all n locations
cgtccggatacgatgacgtcgatgactcttcttcatgtcaagatagaactccaaaagggcatcggagcaaaaggacaggacctggtattcagaatgacatagcagaaaatatagtgactggaggatcaaatgtgagaaggatagctagatgctcttcagatgttagtcagagccacttatacaacacaaaaatagcagacttaatcagaagaaacaccacgctcgaagaccagctttcgaccgcgctggcaagcaaagaccagctagagaagagcttatcgtcggtcattcacagcagagaacagctggagaagatgcttgccaacaaagacaaggaggctgagatgctgaaagagaagatagcatgcttagagctggcgcangaagagtcgaacagcctctcgaacacggtgcacgctgataatgtgcgccttgaacgtgaagtggcattcctgaaggccgtcacagatgaaacccagaaggagctgcattccactcgtagggttntagcaggagaacagtcacgcgcgttccagctccaggttgaagtgttccatctcaagcagaggctgcaaatactggaggggagatcaggaacacccaccaaacaacctntataggctgtagtggtcac

SEQ ID NO: 460639 - DNA, 340 bp, Sorghum bicolor
cgtccgaaaaaaataacgtgaaactataaaaattgaattcaagggagaaaatgtcaaaaagactgcaagataacgaacacaggcacagggatgtcataagtccatgaggaaaaaggccttagggtcgcccgacttgacgattcttggctatgtatctcgctgggaaaccttttcctagccaactgtctccatataactactcactgtctccgattaccacgttgggatgtggcgaaccgttgtgctctctgttccaaaaagatccactcccttttatggtttctgggagcttcaccaattgttaacagctatggaggttgttctctagcatacgctctgc

SEQ ID NO: 460640 - DNA, 228 bp, Sorghum bicolor
gtattacaccgacatccccacaggaggacccaagggaaccaaccccaggtgcccccgaattagacgtcataaagcttgcattaggctacataaagggaaggtacgggaccaacgcctaaaacggcaaaaccgggaaaaccccgccgaacccaactgaaccacatggcggaaatcccccttatgaacactggggaaaagcgcaaaagggacgcaccgaaaacagttgcc

SEQ ID NO: 460641 - DNA, 442 bp, Sorghum bicolor
  unsure (1)..(442): unsure at all n locations
cgtccggcggccatggtctcgccggaggtcctgcctggaggcgtgcatgggggtgtaccacaactccctctatgacctcgacgcctccatcgcagccatccaggagaggaggtatgcggacgccaagacgtccatgagcgccaccgtcgacgcgcccatcacctgtgaggatgagttcaaggagcagggcctggagccacccatgaaagcagagagcaaacgcctgtttcaacaggcggccatcaccctcgccatcatctcccttctatgatagtattgacatgatccatctccctccctgcgatacagtacagctactgcttgctactagtgtgcaactagctagctatagatagtgcacactccaatatactngcatgtatggcatcatctatcgctccatgtttgtttatctacaatatatatgcaatccggcattgtc

SEQ ID NO: 460642 - DNA, 373 bp, Sorghum bicolor
cgtccgggaaaaagaaagtgaagctatgggactgtcttcccacgagaaatgttcaatgactgggaaaaaggttctaagacacatttatgttgaggcccctggtgctaaggcattagagacccctccttgtctatttttttttttttatctcggagggtattttcttttcttgtgttgtgtcttttttttttcttctcttgttcttcctattacactgctgagattttgcgaagcagtatgcgctgtggtccaaagaagccagtttgctttatggctgggtgtgcttaacggagtgtttgttgctttgtgggttgtcctctaggatgtgttatgtgttgactgtttccttttagaatatgtgcaattgttctag

SEQ ID NO: 460643 - DNA, 436 bp, Sorghum bicolor
aaaaggcaaaacccctgaaaaacggtttattttttttaaaaaacaaaaaactgtccaacccccaaaattttgggttttttttaaaaaaaccccccccccaaccaaaaaaaaaaacttaagttccagggacactttttcttttcgaaaaaaaagtttttttttaaataaaaaaggggcccaccggcccccccgttaggtttcccgggtttttaaaaaaccccccaccctttttgagggccccccccaaagttaaaaacagtctggggacaccccacccaagggggtgtaaatttgcaaagggcctggttacaccccaccaaaaaccttttggttttttttgagaaacttgggggggattaaaaaaaaatagcccaagaaaaaagggcagaccaaagtgtttgggcccatgtttttgggggtcttccaaacattaaaa

SEQ ID NO: 460644 - DNA, 588 bp, Sorghum bicolor
  unsure (1)..(588): unsure at all n locations
cgtccgggcaaccaaccagcaggtatttatccccagcaaatggctggagatgtctaccagcaacagatgtttagtggccagatgacaggctatggctatggtcagcagcctggaggctactacgttccgaacgccgcatatgcatatgccagtgcaaatgatctttctcagaggatgaatggtctctcgatgcaagacaacagtctgtatggcacacccgcgccgtcttccctccagcagcgtaacaggccaagtagacctgaagattcgctctttagtgatcttgttagcattgccaaaacaaagcctagtaaatctgcgtccaacaaggctggtaacttgtaaagatgagtcggtgcttacaaagtccatatgggggtaccttctcatagtatataaattcttggatttttttttacttatttgaaagtggtaggcgagatttgtagattctgagattgatagcgattgttttttcaagaaaaagtttgtttaccatcattctgtagccttaatgtcttgtgtacatataaatggagggaaaaagaaaaaagagaggagtccagtatgctgtctctcctggtnnaa

SEQ ID NO: 460645 - DNA, 213 bp, Sorghum bicolor
tgtatgtcttgtgttggggggcctaaatacacttgaccggacgtggaaagacaacgtatgcactgtgaaaaccgtgacatgacctaactgattattctgggaggacatgcacctttcgctagctggacatataccaaagaggcttgaacaggcaggcgctcccaacagttgaccggactagatggaagacgtgactcgccctgtaacggatca

SEQ ID NO: 460646 - DNA, 321 bp, Sorghum bicolor
ccgtccgaatacaatgcaccctgcaggcggccgcgatcgcggagatcgtccatgctcggtataaccgagtgactactcggatcatcatactggactgtgacacttgatgacggagctgcaccgaagggagagccctgtataccgggctggggcctaggcacagcgaccgccgacctgtcacgtcatcactgctggatgagggacaccagaaccggtcgactcgccatgcactgcatgctcgacttgttaatacatgcctacttagcacacgaatggccagtggagaacctagacaagcacgtacaataccccttatgcaac

SEQ ID NO: 460647 - DNA, 345 bp, Sorghum bicolor
gtccgcaactgcaaggtgatcagcgtaaaaatgttgcaacttttctagttgaggctggaatagtgaagaaagagagcatcaagattcacggtttttagattgcaacgtttaagtgtttgtgagtgctatcatatatgataccaagtattgaagtttctgaagctccttcacaatatcagtagtagttattcatctgaacctgtgtcactatttgatttgagaagactggtattgatgcaagttgtacttgcagtatgttttctaagtgttaccttcatgaaagtatcgtttgtctggggaaccgtctactgatattgaataacaagagagattgctgtttgggtt

SEQ ID NO: 460648 - DNA, 458 bp, Sorghum bicolor
cgtccgcgagacgcagacgaaccccatggatcagtcagtagcacagctccttctgcagaaaccctcttaccggagggaccggccggacctcgctactgtcatactgccggagctcaaccggttaaggaaccttggccacgcgtacgaggcacgcatgagcaccgccggggccaacggcggaagtgccgaaaacggtgacctggtcagcgcgacctcgacgacggtgggtggttcttggaaaacggcggagagctagcgggaggtccggtgtggccctgtgtcagttagagagcgagcttttgtacggagaggagaagtgtccatggaacttaacgttctttttatggatggagatcgagttttttaaaaaaaaacccaaaaatcttggtgtatgtacagtcttctgtctatgagaaatactaacacgtcttgcagcgctgctgcctctaatcattttg

SEQ ID NO: 460649 - DNA, 581 bp, Sorghum bicolor
  unsure (1)..(581): unsure at all n locations
cgtccggaatacaggaaccagcgtgcagctaacaccttgggttctaagggcatgtttcagttgatccaaaggaaggggtcttcaaggaatctgatggcactccttaatactgacggctcagtcaccaaagcttggcatgttggtacaagtgatggcaatggggatcttaatgttatcacaaagagcaggaagtctgctgaaaatcctatgctggatgcctcacaaattggaaaggcagaggcggtcaatctccagtttggtccttttgggatcagtgcctggatgagtgacacgggtggaaccagccatactggaagcgtagaagacctgagggctgataacgtggagactggtggtaggaactattcatcatgctgcagttcgccaaagtgtcagattctacttcgaaggagcttatggaagactactcggtgtatggcagcgaagaagaagaagaagctgacgacccccgtgatgctgaaactgatgaagacctaactgangaagaatgagacatgcacgagataaatgcacgctctgtggacgagcactcaaccaatgttgatgaggaatatgaggac

SEQ ID NO: 460650 - DNA, 501 bp, Sorghum bicolor
cgtccgctcacaacaggccagcgctggagaacgcgacgaccaccgcatcggccgtcctcggcgaccacgacaccgccgccggcggctgcggccacctgctgctgctgcccggcgtagtgcagcgccaggctgcggcagtggctggccacacggcgttcagcgacccacgcagcgagctcacctgcaacaacaacaacaagtacgacgccacttggtccgtcgtcgtgcccaggaagcgcgcgcggatcggcggcgcggtggacgccgccggcctggtcatggaggggcaccgccaccgcgcgctgctgcccgtgccgcaggcgttcgcgcccggcggaagcggagagggtgccctgggcgggggggggagcagcagcagcagggtgctctgctccggcgccgcgtccaccagcggacgcccaagcaccgtcgtgccggtgtcgcagtcgcagcacggtatactggcgcacctttactcgcacagcttctaggtcgacgcgc

SEQ ID NO: 460651 - DNA, 597 bp, Sorghum bicolor
cgtccggctgtatgagcttgtggctcatctcccagacaaggctaacaactaccttacaccagcactctctgttttagagaagaatacctgattgatgtgctaccagactcagacatgcaatatacgggtcatataatgtgtatatttcctcctcttgtaaagccatacgtttttcttatacaagccttgtgattcacatggtatgtcatttggcctttttgtaaagacgattgcagactatgttaaaaaaatcgttgcacatacttcagacattaaaggttgtggaagccgagtcacggcaagccgcccttggtgagagcctgtttggcacggcttcggccggctccggctcctctgacagctgtagctacacgtcaattttctctctcctatctttctctctcactgataagagaggagcacccggagctaaaaaaatcgagtttctttggctcctgtttctgtgtgctacagtacagctacagtgtaaaagagagataagtttcatacctctcccatttgaacagaattataaattcagattttagagtgaagtatttgaacagaattatttagaaacacatacttttgtcttgc

SEQ ID NO: 460652 - DNA, 533 bp, Sorghum bicolor
cgtccgctatatatagaacgaaccttccacctcttatgctagcaggataacagacaccagctatactattcctttatgtgatcagcaagctgaatggcttaggttatctttcacttcatatcctgcgcgaaactgttgcttctctgcagctgcgccaatggcacattgcacatgactatgatggccaggcgagggaacttaattgtaaatcaatatgccatagcccaatgtgccctccttattcagcgatgacagagtgtcagcctatcgctctttcagctgacaaaacgcatctggtgtttgagacacgcccacaagttcatgatgtctcatttggttccttcttcgaggtgcattgcatgtggtctgtgaaaactatcagatgtagctcgtgcagtctcaacatcagtgctggtgcgcatttcaagaaatggtgcataatgcagctctacgataaagagtggcgctgtagactagttgaagaaagaagtcacggaaatgttacactctgcacagggacatatgctcaaagt

SEQ ID NO: 460653 - DNA, 537 bp, Sorghum bicolor
cgaccccgcgtccgaaataaaaaaaaataaaaaaaaaaaaaaaaaaaaaaaaaaaaaaaaaaaaaaaaaaaaaaaaaaaaaaaaaaaaaaaaagggaaaaattacaaacgagggggggcccattaattagtttctggggtgtcctcccttttgtttccctggcttctcctccttttttttctcccctgtgttcatttttttggccctccttttactatttcttggttcgggaaacccttgcgttacccctcgtaattccttttggttcccccccttttttcctttgttgctatttccccttttgtccccgtacttattcgctttctgactctgtcctttccttttttccgaattgtgccctgcctttatggcgacctgttacccccgcctgccgtttggtttccccccggggggctgtttgcttttccttcctccctccgacccatttttttgctttttttcctttcttatttgggcttttttccttttttttctggacaggttttcagtgttggcctccttttaggttacctgggg

SEQ ID NO: 460654 - DNA, 107 bp, Sorghum bicolor
cgtccggttgagtccgatgttgtctggttatttgtgaacacttgctgctgtgcagcagtttggtcgaactatggaatgaagaataagtgaaccctgaagttgtggct

SEQ ID NO: 460655 - DNA, 142 bp, Sorghum bicolor
aacctaatcacaccacctcatacgtcatgtatggcgacacctaaattcaccttaatttccttcatccagcaacaggagcagcaagcgacgatccggtccgaccaccatcaataccagtcgacaagatgatgattaaggcact

SEQ ID NO: 460656 - DNA, 77 bp, Sorghum bicolor
cgtgcgtggacgcgtgggtcaaaaaaaaaaaaaaaaaaaaaaaaaaaaaaaaaaaaaaaaaaaaaaaaaaaggactg

SEQ ID NO: 460657 - DNA, 544 bp, Sorghum bicolor
  unsure (1)..(544): unsure at all n locations
cgtccgtatgaatcaatcgtacaattcttcaccagtcggaggtaatattggtggaaacggtcgtggtaacgatcgtaattctgaacgaaatatggatcgaaataatgaccgaatgggagatcttatgggtggtggtggagccccgggtggatatcgccacaatcccaatcgtgaacgcaataatatgggaaatcataaccacaaccattataacaaccataatcgctataataagcacaataacaacagtccgcatccgcacaacaattataacaataatgcggtaaaacagttgccgccgcggtttaaacaaagtgtcatttcacctcaaacaaatcagcaatcgccagagacatttgacactttccggccaccaataaatagcttactttacaaagcaacgaattccaatcgacagactgcacaactgccaatgtcgcagcagccacgtccgnctagtgcatcatctgtggaaacaactggcagtactggcaccacanactattcaacaaatgtaaattcgccgaattcaaactatcaatca

SEQ ID NO: 460658 - DNA, 480 bp, Sorghum bicolor
  unsure (1)..(480): unsure at all n locations
cgtccggaaggaagaagtgaaatctattagcatgttagtttttcctggtacaggtcttctccaaaagccattgctgaaggccttacctaaaggtggtcaatgttctcaaggagataaaactgagaaatcacctgatgtagccaatgaaaattctctttgctctgatgcaagtgttgatcccttagatttgggggtcaaagagcctggggacaacagcaaaaatactgatggtacttgcaacggtgatgtttcacaacaatctccccattcttgattctaagatttggttgcagctttttgggccccaagctttacatggacgaagcctccattagtttttgtacctcgagttttgactcagcagttagcatgacatccatccgttggcagaaagaggcntgcggttttttgcagattagttgctggggcacccctgtagtttttactcccaaattgatggctcaattgactcgtcgcctg

SEQ ID NO: 460659 - DNA, 85 bp, Sorghum bicolor
acctacgcggacgcgtgggcggacgcgtgggtgaaattagttcaagatttgctagtctcgtatattttctcttgagtaaaatcta

SEQ ID NO: 460660 - DNA, 469 bp, Sorghum bicolor
cgtccgcggcacacgcatcaagattccagaaaaggccgcgcagccggttcacggggtcccgtctgctggtaaaactcaggcagccggcggaggatcgatcacacgtacggcgacgggacgcaagatggtcgccgccgtcgtcgcgctggcgctgctgctggtgctcggcgcggccgaggcccagatcctgccgaccccgtgctgccgcattgactgctgcgacggcaagccagagtgctgcggtcccggcaccgggatgcccgtggtggaacgcggcacccccggccgtgtggccttcgccggcaacgacgccaagcttcggccaggtgggcgcctcgcaaggccggcgccggaaactagtataaactaggtgtccttgtgtcctagtcccgtgcacatctaagctactactagagtgtcctaggcttcggacgttgggagctgcttctggtgtctagtacgtaagcac

SEQ ID NO: 460661 - DNA, 366 bp, Sorghum bicolor
cgtccgcgtacgcataggctaccaacgcctctccaaggactacctcacgctctcattcattcaagggaggaagctgctgttgatactagggagcattatgtagcacaaggtcctggtctactatttaatcatcaaatcactcggattgtccaaatgatataacgtactatccgagttcatttgtaacaaccgaactgaccattattctgttaaggcgctgaggaacagggaacatggcatgcagattcatttgaacaattgccacatggagacaataatattctactccatgaaggatcgattgctcactatggacttactgttcagagtgtaggaatttaaggggacatacttaaagccaacaat

SEQ ID NO: 460662 - DNA, 416 bp, Sorghum bicolor
  unsure (1)..(416): unsure at all n locations
cgtccggtcgtccaccatagccccaaggatgatcacggtgagcagcagcagcagcagctcttcgactacttctactacgacgccaccgccagcgacgatgccagtagcaagcctaccatcgacatcaacctcgacaacatgcaacagttcgattttgatgatagctgcgccgccgccgacgacgacaaagtggatctgacggctccggcggggcctgatgaggaaataaggcatcaccagcagcacctcgacgtgaattgcggccagattgacgaccacaaggattatttcgagataaaggcggcgtcactcgtcngcgcgttcgacatgcggcaggagctgcagccggtggtggcgtgaacgcccgggttgagattgcatcaaggcggtggtgtgatgccggatttgcgtcgaca

SEQ ID NO: 460663 - DNA, 454 bp, Sorghum bicolor
  unsure (1)..(454): unsure at all n locations
cgtccgtggagcnggggcataatggtaaattcgtagccaaaaattggaggtgggaagaacgctcgccgcanaactttcagggtgcgcagtgtattcagaatgcccgccaaaggccaaaatttttccagcgcacgcacttctgttcagggtgcctcttttttcttctattattttttcttagctattgaaataataaaatactgatagataacaccaaattttgaataccctagaccacttgtttaggtgataaccaaaatatggattatgatgtacttcattatttagggaataaccaaaaagtttagaagttagctatagctatcaaattatttaggaccggttatctaaataaatcgctaatgtcccctcttattacacaccgatagcacttattagtgtgttgaatggtggatgttggatgtgtgaccttccaatgagtctgtcatggatg

SEQ ID NO: 460664 - DNA, 417 bp, Sorghum bicolor
cgtccggagagagcgtctgaggtgttcctggaagcatcaccaagacataatacaccggtcccgagccccactgcacaccaggagcaaccatacttcaaggtcagcagcaggtttgagtcagaaatgaaggaagccaatgagatgctgatggaatccaagaagctccgtgtcaacacaggcaagccgaagactgtaacattcgcgccaaccatagaacgcgagttggggaacgaaaagagtggctggaaagacagggagctgcctgaaccagcatcccaagtgttccgaaacgcatttgctacagtctatcagatggtgctcaagatgattgctaaaatccacgaggcaatggtagcatataacattgatagacggcacatgctaagaaagttaatatcagtcaacagatacctgatg

SEQ ID NO: 460665 - DNA, 283 bp, Sorghum bicolor
cgtccgcggacgcgtgggcacacactgatctggagtatccacacgaacgagatcgtacactcgaactgatgcttctactatctctcatactacattgggggcatttgcagccaggtaagagaaacataacgacccatacatctcgaattaacgcaactaaatgcatttgcaccacactatccacagaacagctcttgcacaaggagctaactgatccacgagcgtcgtaatccatggagacgaccgctcgctggtcagcatgaaccatctttgaatcaaccac

SEQ ID NO: 460666 - DNA, 416 bp, Sorghum bicolor
cgtccggcgaggcaggctccaggaggttctcctcctacccgttcgctccctcccctcgatccctttcgccgcgcgcgcgagagggggggagagagaggagatcgaggagacaaaaagaagagggtgttgtgcatgtgatcgggcgggtcgtcgtcgcctcggccggccaaactaacgacgaccaccggccggcactcgattctcggcggtaggcaatgggcaagatcgagtacgccgtggtggcgcgcggtgcggtggtgctggcggagcactacggcgcgtcggcggcgggcggcaacgcgggcgccgtggcgaggcaggtcctcgagcgcctccccgccggcggcgccggtggcgacgactgcaacgtctcgtacacgcaggaccttcacgtgttccacgtcaagcgcaccgac

SEQ ID NO: 460667 - DNA, 93 bp, Sorghum bicolor
ctaggctgacggttgtgatcttgaacatggcctgcggagatgcaggacatgggggggggctatcagggacagcacctgcagtggagcctagta

SEQ ID NO: 460668 - DNA, 354 bp, Sorghum bicolor
cgtccggcaagatggtttatcatgtaaattcaaggcgcatgatggttgcaaaaataagggaaaaagtctacatgatggcagcccaaaccttgttcaaaagcatcttaactcttaaagactattgcagggaggcccatcaaatggcaaccatcagcattctccttgcggtatacaaatacgatgatgggcttattagagtcacacacactgttagaagacttgtgtagggaagtgtaccattctgttcatttattgaagcttgctcaccaggcgggtagatagtgcattgttgttacttttcttaaaaaaaaaaggaaagaaagaaggtaggtagtatattcttttgaagatgta

SEQ ID NO: 460669 - DNA, 433 bp, Sorghum bicolor
  unsure (1)..(433): unsure at all n locations
cgtccgcaaacgtcttcaagtggagctgaactatatgatggtcctcctgctatgcattatttgttccaccctgacccaagggtgggtaatttgttcaggaacaggctgcaacattttgttcccattggggcaggaagtaccagagaaaatgggcaaaacagagcagaaagtctcagcagcggcaggaggcaattcagctcgagtgcagctgctaacgatgactgggtgactcctgggaggatctcagttccaactgatgccagtaaaagaagggtgcgtgccagtggatcccattctggctctggccattggtttactgatgacagtgggaggaaggttatgtctcacaaaatgggcangagttgactggccgcaatgcctatcgacaatatcaaaaggaaagtggcaggggattcggcaggtacaagaaaga

SEQ ID NO: 460670 - DNA, 434 bp, Sorghum bicolor
cgtccgcccacgcgtccgaaagaacaaaaactagataagaaaagtttataatttaataataaaaaaaaacatagaatagaacaaaaggaatgtaagcggatgaacaggggctctgctgggggatggtaaatcgcaagggggcactttttttttgttattttaagcgcaaaacaacccggatatttttgttgtttctttggagtgtttttatatttcagtggtggaaacggatgttatgccgttgggcggcttacctctgatctgttgtaatattgaaaaactgcttttttttttttttttttggtgaccccgtcttgatatttgtgtgctatttccggagatcttgacgtttttttagagagctgatgcatactattgttgtcttactggagtacatgttctacttttctcttgaacaatttttggatcgtttt

SEQ ID NO: 460671 - DNA, 215 bp, Sorghum bicolor
cgtgcgttctatatctcgagctaccactctatataaaccaatcttacttacgcctgcattcaacctcatacctctcctatagcatcacgggggtgcaattctcttgccggggtggtacaacccccttactgtcaaatcccttactatacccaactaaatcaccttgtagaacatccctcttcctccacctttcgtaatacctaattatccctcac

SEQ ID NO: 460672 - DNA, 197 bp, Sorghum bicolor
cgtccgaatagatcgagagctgggggtctgctgtgctcgcgcgaaggcaaccgtcgctcgcaagatacttcttttctctggtgtcaaatgaattgccttcactaggctggaggtggcgtcgcagcgatttgtccgacctgggcgtgacgctactgatctgtgttgtggaacatcacattctcctacgatgacctggt

SEQ ID NO: 460673 - DNA, 336 bp, Sorghum bicolor
cgtccgggcgacatcactccctccggggcagggctcgttcagcctgttgcggcataaaagcataaacggaagcatgttttaggttgtcgtcagtatatcctgtgaattgttcacagcaaatactcttcttgtagttgtctaagaaacagatacaaccgggcttatcaaggaaagaaagcccttctatattttgacgatagataaacagttgaaagttttggcggccattgtttctttttcttctccagttattatgttttgcatgtctgcatgtggttttgtagtccgaataatgtacagttttccctttattaaatagatgtaaatttgttgggc

SEQ ID NO: 460674 - DNA, 184 bp, Sorghum bicolor
  unsure (1)..(184): unsure at all n locations
ccatgttcttgatagcacatccattcacttggaaagatgaatgtacagaacaaggngcgaatggattgtggctttcaagagagtatngtntccatcctcattctctgcctgacttcaatgacagactaagaaatggtatcccctatagctgctcaatacctcccatcggtgttaaagagcaaat

SEQ ID NO: 460675 - DNA, 92 bp, Sorghum bicolor
acgcccctgtacgggcataagcgcgcggtgtgggtaccgcagcggccgtcactgcaggcctacccgtcttcgttctcctcttctgccgtcgc

SEQ ID NO: 460676 - DNA, 365 bp, Sorghum bicolor
cgtccgcccacgcgtccgctcaatagttgcatgattgtccaaagatgaattgatctagttgaggaaaacgtcttctagtttttcaccgagcattctcattatcaaatgaaagaaggtatacatgtgagttgatcgaactgacaagttgtacataacaaagattccttctgtgatcatagatcagcttgcaaacatctaatcagaatttgcgatccatagaaaataaataatatacatactgtctcaaaactacatgaaagaaatactacgagcgacccaattggccaaacgactctagagatagggggggtgccgcatgaggactccaggtgttcgaacccgctcctgcgccgacatagttcttg

SEQ ID NO: 460677 - DNA, 187 bp, Sorghum bicolor
caaaggccgaccgacgccttcacagtgcagctgaggaaggacccctgacggcataacgcgggtggggacccagggccgtcatgcaggcctacgccgtcttgttttcttcttttcgccgttcgcggttcccgcaagctctaatggggtccttaggtcgattaggcttacggacctgacccaaaactga

SEQ ID NO: 460678 - DNA, 63 bp, Sorghum bicolor
  unsure (1)..(63): unsure at all n locations
cgtccgnaaaaaaaaaaaaaaaaaaacaatataaaagaaaaaaaaaaaaaaaacacataaagg

SEQ ID NO: 460679 - DNA, 251 bp, Sorghum bicolor
cgtccgtctggagcgagctagccaggctgccatggctgcggcgaacgcaggggacgtggatgtggtcgatttcgactccgacgacgacgacctcatggacgacgacgccctcgaggcctacccggcctcgccctcgctccgtccacactgggcagggagattctcgtgcggccaagacaggcgggttcgagggcttctctccggctagcggcgtcatcatctcgtcacttgctgacctaatatggggtatt

SEQ ID NO: 460680 - DNA, 454 bp, Sorghum bicolor
cgtccgcggacgcgtgggcttcccgacagcattgcaaatttgacagggatgaaaaccatctatctcagtggtaacaatctctcaggccccatacctgacttgagcagcatgcacaccttaactgccgtgcgccttgatagcaatcatttcagtggaacgatcaaaccatcaatggaaaaactagtcaatcttaaggagctatacctgaactacaacaatctcacgggcaagataccagatggtctgaaaaacaaagctggacttgatttgagaactgaggggaacaaatttgaatgaggctggcaaggaggaaatatctttatgcttatcctcaacatgatgctgcacccatgcaaatacagttcaatgatgaagggagaggactgaaggcttcaaaagttgtaggatgacattgatgtctgatgtatgagagctaaagatggatttcatatct

SEQ ID NO: 460681 - DNA, 145 bp, Sorghum bicolor
  unsure (1)..(145): unsure at all n locations
cgtccgaacnaaataatatatggaggctctccctggtgaccaagctccaacacgctagccagacaagagacagagggcgcgttctgggtggcgggcggcctctcgggggggccggcttcggggcggcctgcgggggtcgggcttc

SEQ ID NO: 460682 - DNA, 389 bp, Sorghum bicolor
  unsure (1)..(389): unsure at all n locations
gcaagtattcnnnnnnngngngnncttttccagtactcctggttatagagttgcagacatcaacactcttctgattgcaattgtagcaagtccaattgtcggtgtcgctgtccggagaaacttagctccatgtcttgatgtttgggtgtctgcaatctcgccgagtgcagtgtgttgttggtcatgttgctattttacagtgtcggtagggtttgcctatgtacttggggatctggcctttgcaaggttcattctacggagcctttgccttgacaaccctgcgaggttgtttttcttctccagagacctgattttgcaggcaggtggtttgaacactgtaatatttgcaacattcttctgaagataaataaagattgtgtttcgttctg

SEQ ID NO: 460683 - DNA, 100 bp, Sorghum bicolor
cgtccgaaaaaaaaaaaagcaaccaattaaaaaataaaaaaacaaaaaacaaataaaaaaaaaaaaaaagcaaaaccttaaaaaaatcctaaaaaggggc

SEQ ID NO: 460684 - DNA, 374 bp, Sorghum bicolor
cgtccgctccagcttcgtcaaaatcgacttcggcttcggcttcttcaaacacgacttcggcttcggattcttcaaaaacttcttcggattcttcaaaggcttcatcagcttcttcaaaatcttcttcgactccacctactccgaagcagtagcttctctgaaggagggcacacctttttgaaaactgttaattaacaaaacaacttcttctgtttattttttttttttgagagtgggtgaaagatatggaatgtatctatagtacccctgcttggttggcttggttgcatacatgctttatatatatatatatatatcttagatctcaattggtatgatgtttctcataaacatgaaaattaagagtgatacat

SEQ ID NO: 460685 - DNA, 605 bp, Sorghum bicolor
gccgtaccgaatcgcagtgtcgacccacgcgtacgcgtcagttctacaccatgctgtatgtgcaggaagctgtaaggtaacagaattccttctttcaaaaggaataccagttgacatagactgtggccgtgggacaccacttttccatgctgctaataatgaacaggataagaccttgaagattttgttggaccaccacgcaaatcctaacaccattgttggcggtggcatgggcacaccactaatgagtgctcttatctaccgttcgttgaagtgcatgaagctacttattaaggctggtgcggaagttaatggcgaaggttccgttatgcctcctctagtgtttgctacaggtcatggagggtataccaacttcattcagttactgttgaaggctggagcaaaccctaatattcctgatgatctgggaaggtgccaatagagcttgctgcgctgcgtgagtgcaaggaagaagtagagatgctgctgcccttgacttcgccaatcccaaatgtcaagaaactgagtgttgatggagtaatctctcatgcaaaatttgaaaatacaaagccattggataaaatgcgcattaatagaagaagagc

SEQ ID NO: 460686 - DNA, 131 bp, Sorghum bicolor
cgtccgcccacgcgtccgactagttctagatctctagaggatgcatgctcaaaatgtccatggtctgacagagtcgcaactttatagtgtaagcgtaccacaattagctactggagcatatacatcgttac

SEQ ID NO: 460687 - DNA, 176 bp, Sorghum bicolor
  unsure (1)..(176): unsure at all n locations
cgtccgaaaataaaaaaaaaaanaanatnaacccagcgaaganacccacaaaaaaacaacaaacaacagaaagaaagaagtcaaaaaaagagggggggggagctaaaaagatataaacttaacaccccagtaaaagcaaagaaaaagctttataaaaggtgcacctaaaaataaat

SEQ ID NO: 460688 - DNA, 377 bp, Sorghum bicolor
cgtccgcccacgcgtccggcctgaacccaggaatggtggtcctgcttgtagttgcaagcttcctgctgctcttctttgttggaaactatgtgctgtatgtgtatgcacagaagacacttccgccaaagaagaagaagccggtctcgaagaagaagctcaagagggaaaagctgaagcagggggtctctgcgccaggagagtaaacagccatgctgctgatcctcccgtcctgagctcctatttacatgattattaaaggaaaaaaatataccagctggagccgcagtgttggaagtgactttgttctgtagatgccttgtgtttaatggtacatttgtattggacaccttgtttcagcaactgatgaatcttagcct

SEQ ID NO: 460689 - DNA, 151 bp, Sorghum bicolor
cgtccggccacgcatccggagcctccgatctaagggatcaaggctcgccggcgcagccatgccacagactacacgatgagtgacgtcgctgctgagatccacgtactagctcctcctgctgcaagagctacgcctgcgcatacggtcaggc

SEQ ID NO: 460690 - DNA, 123 bp, Sorghum bicolor
  unsure (1)..(123): unsure at all n locations
cgtccgtnatcccgttcgacccagcgtccgggccaggtntgggtcgactgctgtacgctattcagccacatctactactcgctgcggaagttgacacctaagctgtgttgctgagggcgatgt

SEQ ID NO: 460691 - DNA, 65 bp, Sorghum bicolor
cgtccgcggacgcgtgggaaaaaaaaaaaaaataaaaaaaagggcggccagatataaaaaaaata

SEQ ID NO: 460692 - DNA, 470 bp, Sorghum bicolor
cgtccgcggacgcgtgggccgcactcctgatggcagtaggagcccaaggagccccagcccaagggatgatgtgagcccaccaccaaaggataatggtgcacacaacggctcagaccgtgaagacagccctggggccagggagaacagcaagaggagtcggagcccatctgacggctaccgtagccctgcggccaatgggcgcagcccgagccctagagatgaccgtagcccaagccccaagggcaacaatggtgatgacgagcgccgtggctcaccaagaggaagtcagtccccttgaactgaaaagctcccaaccaatttggggcgcagtgtgccgattcggttgtaacagttatattttcaagttgagacagcaaacagtatttgctcatttctcagacttgcgctttttaccctagaaaacttgtgtaagaatttgttgccctcgggctatgcctggttgtgatatg

SEQ ID NO: 460693 - DNA, 96 bp, Sorghum bicolor
cgtccgaaagaaaaaaaaaaaacatcctattctacaaaatacctaactaataaactcaaagatgtctacaacataaaaataacataaatggggcct

SEQ ID NO: 460694 - DNA, 237 bp, Sorghum bicolor
  unsure (1)..(237): unsure at all n locations
cgtccgcgcagccaaaaaaatgaaaattgatctttgcagttgattgtctggcttgcagtgcgacctagctagcttctcgatcatgtgctcatgcatgtatgcggatgatgtgtgtgtgtgaacagctactacactgttgactgttcagtggcttggatcgacctacttgttcggatagttaatggtttgctatatagcggtgcttgttaatcaaatnaaaaaaaaaaaaaattaatt

SEQ ID NO: 460695 - DNA, 106 bp, Sorghum bicolor
cgtccgtttacctgaaaaaaaacccgacgtgagagagcttacgttcagattacctatgtaaaagcggcatctttactgtatagaaaaagaatggtttatattgttt

SEQ ID NO: 460696 - DNA, 75 bp, Sorghum bicolor
  unsure (1)..(75): unsure at all n locations
cgtccgnaaaaaaaaaaaaaaatntnaaatcttntaacaaaaaaaaaaaaaacaaaaagttaaaataaaacaaaa

SEQ ID NO: 460697 - DNA, 359 bp, Sorghum bicolor
cgtccgaaaaaaaaaaaaaaaacaaaacaaaatttaacaaaaataaaaaacttataaacaaaaaggtcgccacataaataaaaatccaatcgggggggggcgtccttttagaggttccactctttcttccgcttactttcaacttatttcattcttatttagtgtcacaaaattacaactcgcaaacccctgtttcaccccaactaaatagaaaaacctcacttgcaactactttcatttcccatgataaatagccgtctttcactatttgtttttccaaacaatagcccctcctgaatggctattctcaacatttcctcctattaaatgcaatatcggaccccccctggttccccccc

SEQ ID NO: 460698 - DNA, 211 bp, Sorghum bicolor
acgcgtccggcgcaatgttgggttgcttcccggtcgccggccggcggccgtccttgtcgtacgaggatagctccacgtcggcggcgtcgacgtcggtgagcacggcctcgccgtcgacgtccacggcgatcacgtcgtccccggccttcctcgacgacgacgactcgctctacctcgacgacgcccagcctcaaccggacgcttgtgggct

SEQ ID NO: 460699 - DNA, 240 bp, Sorghum bicolor
ccgtccgatccggtcgaccacgcgtccgccatggaacatctgatcaaggcatggcggtctggggcttcgggctgcgagcgccccaggaccgttttgcattactgcacacgagcattttacttgcagcgaatgacctactggcatgctgtggaatacgtgcggcgacgggtgtgatggaggctatactacaatggcatggcgctactttgctcaatatggtgtaggcactgaccagtgtga

SEQ ID NO: 460700 - DNA, 208 bp, Sorghum bicolor
cgtccggccgcctgctctcccaccgctgccgcacgacggaccctgcgcgcgccgcggcgttcttcgtgccattctacgcggggctcgccgtgggccgtcacctgtgggcggccaacgccaccggcgccaacgggacagggactgcgtccgctgctgtcgggctcacgccagcgtgtccacaaccacggtggaccttaccgctgccctc

SEQ ID NO: 460701 - DNA, 108 bp, Sorghum bicolor
cgtgcgcccacgcgtccgtgtaattttatccttgcatttgctctggtgcggtcattgtatcttttaagagcacatcgtcctgctgtgagggcgggggtttctattatg

SEQ ID NO: 460702 - DNA, 459 bp, Sorghum bicolor
cgtccgtttttttttttttttttttttttttttttttttttttttttttttttttttttttttttttttgtgggggcatttaacacaggtcggtttttttgcccatggaaaacatgggtggttcgatacaaagataccagggtacagacaactaaaacactagtaatttcgttcggggaatcgaacccttctttattccaaaagcaaatgacagcttaggccgtcacttgtttttgcccagcagcttcatctgggtttggctttggtgctcttcctccatttttttccgctttatgggcttctttttttctttttgaagcctttccaactcctgatacccggttagcttcttttggggctgttccattggtttttatatcaaagccttttaagattttttttgttttttttaagcttttttttttagtcctccccgtctctttttttttcggtccactt

SEQ ID NO: 460703 - DNA, 374 bp, Sorghum bicolor
cgtccggatcactcaggtacgccggccgtcgagcgcgcagtgtctcccaattccacccaataaaccgaaactaataacatctcctcgagcgcgaggcgaggcgaggtcggctttcccttaatttccttcatccagcagcaggagcagcaagcgacgatccggtccggccaccaccaccaccaggcgccatggagatgaagacggtcctcgtcgccgagctcgaggtcgccgcctaggtcaccgtcgagctggcctcagacgccaccgatgcgaccgagccctcctaggcaggcgcattaagcgcgcccgccgtagcggtttctctcctgttttacccttttactatggggcggcccttctacaggatccaatct

SEQ ID NO: 460704 - DNA, 375 bp, Sorghum bicolor
  unsure (1)..(375): unsure at all n locations
cgtccgggagtcgtccggaggtggtgccttgctgcttcctcttcctcgtctcgcctaccacgaacagatccatccaatactccaatccaagcacgccgccgatccaaccacgaagccatggacgccggaggcgactggcgcgcccagctccagcccgagcggcgcagcaagatcgtgaacaagatagtactgactctgaggaagcatctgccggtacaagtgccagaggggcagggggctggttgagcttcaaagaattgccgtgcgattcgaagacaaggtgtatgctgcagccactacccaggctgagtacttacggaagatttctctcnaaatgctgtcaatgtggagttacacanatacacaacagaaccc

SEQ ID NO: 460705 - DNA, 515 bp, Sorghum bicolor
cgtccgctctacttctacttgcagcaattcgacagaagcacggtatttcgctgcagttgttccactcttgaactccataaggcttctgatatatggactccgtctctacactgatgaagctctagtaaaatcagtgacacgtgaaggaaaaccagagtaaatcctattgactgaaaaaaccgtatgatcctttagcttgctgctctgacaatgatgactttgcttctttacagggaattgctgagaggtccactgtattatgtgttggtgctgttgttcagtgttttagtcttctggcgggagtcccctgttgggattgtctctttgtcaatgatgagtggtggcgatgggttcgctgacattgttgggagaaggtatggctcagtgaagctgccattcaataagaagaagagctgggccgggagcatctctatgttcatttctggttttctgctgtccgcgatgatgatgttctacttctcaaagcctgggtaccatgatgttatttggcagga

SEQ ID NO: 460706 - DNA, 143 bp, Sorghum bicolor
cgtccgcccacgcgtccggaaactggtaataacataaccgatagtgtagatcatgcttatacactatcttatcaaccacaggcactgtcggacaaagttataatttcgtctcaggctggtacagcatattgacgtgagtcaac

SEQ ID NO: 460707 - DNA, 202 bp, Sorghum bicolor
gtatggcacccaactttacatgtgctggcttttctgaaaatttgtacagactttgaattgttgaatgtacatagtgttgtttcatcgtgtccatggacgttctatagattatactcactgcatgggagatggagattattcactgtcactgacagcatacttattgttgtctgcatgacatcatctatgatgatatgctgat

SEQ ID NO: 460708 - DNA, 434 bp, Sorghum bicolor
cgtccgcagcagccgaattcttctccttcgtttggtttggttcttggcttgttggatttgggtagggtagctagtagttggctagctgttggttttttagtaggaggatacaggatgagaaggagaggcaagaacggcgaggaggattcgtagctcgtgtcactactcactacctcatcagagagcatagtggtagtagagaataaatcctccctgctctcttctcttccattttgtgtttttttttaaaaaaaaagtcccctggctgcctgaatgaatgtcaggaataatcacatatagtataatctgatgctagctagcaggtaattagtacatgtgtaaattttcagcctcaacgtcttgttttgtggagaacatatgaagtattcaaagtcgatagagtgcatatgctctgttctctgaatacctgatcc

SEQ ID NO: 460709 - DNA, 316 bp, Sorghum bicolor
cgtccgtgtaggaagcgagcgggatttctagaggaatagagctgacgtactctacagtccggacactatcctttacatacgagacacgtctgctctgttcagaggcttcttgaaatggctcaaaccactgggaaaaccctaatcagcgacatactgaatgaattcgggaaaaccatcataagaatcatgctgcatacattacgcagagaggctatgacctcgaccatgtgaacagttatgcacagatgctgacggatgctactctccatgatgcgattcattaagatcgcactgagcagtggctgcatgcactacg

SEQ ID NO: 460710 - DNA, 97 bp, Sorghum bicolor
  unsure (1)..(97): unsure at all n locations
cgtccgtaantttgcgatgttttcccacaaactaaatgtttgtaatgatacaacacatgtatacttaaagtgtcattgtcttattaaaagaagggag

SEQ ID NO: 460711 - DNA, 98 bp, Sorghum bicolor
cgtccgaaaaaaaaaaaaaaaaaaaacaaaaaaaaaaaacaaaaaaaaaaaaaaaaaaaaaaaaaaaaaaaaaaaaaaaaaaaaaaaaaaaagggggg

SEQ ID NO: 460712 - DNA, 73 bp, Sorghum bicolor
cgtccgaaaaaaaaaaaaatattaaaaacatactaaatgcataaaaaaaataaaaaaaaaaaatacaaaatgg

SEQ ID NO: 460713 - DNA, 435 bp, Sorghum bicolor
cgtccgctccttcctgctggccatggcagcgctggcagcattgtttgctgttggattgtgcggcaacagtgtgaccttgacggtcggcaagggcactacccccacgtacacccacctagtccttgtcgccaacctccccatccatgagctggccatcagagaaaagggcgccgcggaatttttggatgacatgaaggagtcaccagccaagacctttacacaagacagcaaggcaccactcaagggacccctctccgtccgctttgctgtgaagggtggtggctaccgcaacagggatgagattttccctgttggattgaagcctggcgcagttatcaacactaacatcccgtattgagtaatcggcacacatctggtctcgcattgagtgaaatttttttaccattatatattctgtaagatagaatgaggata

SEQ ID NO: 460714 - DNA, 289 bp, Sorghum bicolor
  unsure (1)..(289): unsure at all n locations
cgacccacgcgtccgnttgataattataaaaaaaaaaaaaaaaaaaaaaaaaaaaaaaggaacaaaaataaaaaaaaaaaaaaattaaggtcccctgctttggggcgggcgggcttttgtttgcttgcctcgcaacctctttccttttgcctggtgtttccaaaattcaagtcagtgaaatctattccctgccctattttatgcccattcctgaccatcacctttcttgatttacccgaattacatcccgggccccccaccttcctttttacaaaaggtgcccaagcca

SEQ ID NO: 460715 - DNA, 362 bp, Sorghum bicolor
  unsure (1)..(362): unsure at all n locations
gaaggcgagcgagcatggagctcactaccacgtagctcgaccgaggagcagtctgcgcctcgacgagcactacaacggagacgaagtcgccggcgccgccgttcacgttcaccggcaaggacaggccatggaggacactgngccagcccttcttcgttcctgggagggcctggcaaaagccgggacagacactactcatatttcgcgcgcgagcttgacgaccactccaacacgcccatgggggtgccctgtacggagctccgtggcgccctctatggccgggcggccatgcttttttttcccagaatattggggttagacttttcctgttccttgtagaaccgatgtgagctcccacccct

SEQ ID NO: 460716 - DNA, 301 bp, Sorghum bicolor
  unsure (1)..(301): unsure at all n locations
attccnggtcgacctacgcgtctcgcagactctgtatatagctgaatagtttgtgtcaaacagagaggctcttggagaaagtcagaattcagagcgaaaaaaaaaaatggtgtagggaaataaaaaataatgaaacataatattgcgccccctcttttaaatgaacccactctcatttccgtattcatatcaactattaaaatcttttttattgtgccccctctattcttatactctgccctttgtttcccccccttctcacttgtaaaactcctttttttccccatattatttttttttt

SEQ ID NO: 460717 - DNA, 244 bp, Sorghum bicolor
cgtccgcggacgcgtgggtttttctttttttttttttttgatcctatttttccttttcctattttattattttattcttatacttaaggtgggtggacacacaacggcttataccgtgaatacaatttttttgccatggataacatcaagatgagacttatcacatctgacggctaccgtagccctaccgcctatgggtgcagtcctagccctataaataccgtaacctaagccccaaattcaa

SEQ ID NO: 460718 - DNA, 65 bp, Sorghum bicolor
  unsure (1)..(65): unsure at all n locations
cgtccgnaagaaaaaaaaaaaaaaaaaaaaaaaaaaaaaaaaaaaaaaaaaaaaaatgggcgaag

SEQ ID NO: 460719 - DNA, 114 bp, Sorghum bicolor
  unsure (1)..(114): unsure at all n locations
cgtccgaaaaaaaaaaaaataaaaaataaaaatttnaaaaaaaaaataaacaactaaataaaactaaaatatacaaaataatagaaaaaaaacaaaggggttgggtatctctgg

SEQ ID NO: 460720 - DNA, 185 bp, Sorghum bicolor
cgtccgcggacgcgtgggctctcttcctcccggcgtcggcgtcggccgtcgccagcgccggccggccatgggttgcggtggctccagaggaggccgtggccaccggcaacaccactaccagcgccggcggctgtaagctcctccggaggaagtactcgttcttcaccgggcaagccatactatca

SEQ ID NO: 460721 - DNA, 392 bp, Sorghum bicolor
  unsure (1)..(392): unsure at all n locations
cgtccgcagcacccagggagaggacgtcctcgcccaccaacaaaagctgggcgtgtcgccagacgacgagaccgatcacgccgcccggcgcaaccttctgtcgaccgagctcgacagcatcgccagcacgtccgccgaggcaaaccgccagcttctcgcggcggaggagctccccgacgagctcgccggcaagcgccagctgctgtcccggacgctcatggggatcgacgaggcggccaccgaggccaagcgccagcttgatgaggcaacgacggagaacaaccatgtcggtgttcttcaactgccggttcgaggggtaccaggacacgctgtacgtgcacgcgaacncggcagttcttncgcaaactgcgaagtggctgggcaccgtggac

SEQ ID NO: 460722 - DNA, 363 bp, Sorghum bicolor
cgtccgcggtgttgccccctcggctcggccctcgtcggcggactctgctgctcctcatggcgccgtcctcctcctccccgtcctcgttgtcgtcgtcgggcggctcccacgcgggcctcgccatcgcggccaccgccatggcgctctccggcacgctcgtcctctactccctgtgccgcgccaagcagccgcacctggtcccctccgacgccgccccgtcccctcgtcttcgcccgtgcctcgcctcgttcgacaagcggaagaagaagaagccggagatggcgcggcgagggaagagccagcagaagcgggtgcgcttcgcggacgacgtcttggacaccaaggacaatggcgccgccaact

SEQ ID NO: 460723 - DNA, 401 bp, Sorghum bicolor
tcgtccgcccacgcgtccggtcatctttaacgttttgtgggagatggttgtgagctctggtacctgcctgaaaataaatgctgcggctctactgagagcacttgtaccctacactgatgtgaaagtagcatcaactcatattttgccagcacttgttactcttggctctgatcaaaacttgaaagtaaaatatgctagtatagatgcatttggagctgttgctcagcatttcaaaaatgacatggttgttgacaaaatacgcattcaaatggatgcttttcttgaagatggatcgcatgaagcttctatttctgttattcgtgcacttgcaatagctgtgcctcattcaacagataggctacgtgaatatcttttaaccaagatatttaacatgtcaagca

SEQ ID NO: 460724 - DNA, 538 bp, Sorghum bicolor
  unsure (1)..(538): unsure at all n locations
cgtccgcagccaagctaagagtccccctccagtggttaagggctctgaacgggtctacgaggagaatgagaatctgaggttgcagctcgctttgaagacaacagagctcaaacaggaagagaaccgcaggctccagttagagttgattataaagtcaaaggagaccgagtccctgcagaagcagattgaagatctgaaagctgagaatgagcagctcagaaagaatgtaaagccacaaagagtcgaaaggaaatgccgatactgaaatgcatatgtcatgcatgactaccgcaactgtcctaagaggcgacgagctgcttcttcccctgaagtaacagatggagaggaagaggactcttactaacactgcaaggctgcggcctgttcgtcacatcccttttgcatgatngcatcgatgcatgcatctgttgacacctaggagttcacaaaattctgttccatcttgctaaagttgtcaccgtagtgtccgggcagcagtataaactatgtgatgtttatagttattctgatgtctatg

SEQ ID NO: 460725 - DNA, 366 bp, Sorghum bicolor
cgtccgagtttcccagtcaacatgtcaaggataagtgggccaagaatctctaccttgctgggatatgctatgggcgaaccgtggcctaacatcgtcggttgctgacctagctgttgtttgatgtatatttttgagttttcatcagctgctaccagcatgagccacaagtacaggggagcagtgtcctagtccatgggaagaagatgaatgaattccgatgtatgtacctgaacctgattctaggtttggtctcgtaagttaatcgggagaggtgggtgcagacagaatagcgtaatagctactgatcagccgtaacgtacccgtccgatccaataaaacgagtctgtaatgtggcttttgcagtgc

SEQ ID NO: 460726 - DNA, 348 bp, Sorghum bicolor
cgtccggcgcgccggactactgcaacatctacgtcgtggccaagggcaagtccgtcaatgtcaggctcgccaagtgcggcgtccctgccatgcacagtggcgccgacaccatcccttcggacaccgactcccaatcgggcctgtacgtgcgacgcggctcccggggccacctgccgccggtgatgcctgacgccaccaggcgctccgttgacggacgcaccctgccggagctcaacacgcggccagcgttccgcgagcgctcgctcccgtcctcggccaccaagaacgtcgtcgtcgtcgtccccggaaaagacttctccgagacgttctcccgctccgcgaggcacg

SEQ ID NO: 460727 - DNA, 56 bp, Sorghum bicolor
cgtccgaaagaaaaaaaaaaaaaaaaaaaaaaaaaaaaaggggcggccgatatagg

SEQ ID NO: 460728 - DNA, 268 bp, Sorghum bicolor
  unsure (1)..(268): unsure at all n locations
agtaccgtccgnnatcccgntcgacccacgcgtccgaaaaaaaaaaaaaaaaaaaagaagaaggcaccaagacacgacaaaaaaaaaaaaatccaagaatgaaaaaaaacaaaatacaaatgggctcccctataatctgtgggccgccccttccgtggctccacgctgacgtacccttgcatcccacgttctcaatctatttttgtcgcccctaaattcatttcactgtccctcgtttaacacacgtcgggctggnaaaaccctgccg

SEQ ID NO: 460729 - DNA, 383 bp, Sorghum bicolor
cgtccggtcgacgccggcctctaactcggagagtcggagcccggcggccggagggcgacgttcctaacaaataataatttattattattacacagctaactaataagccatgggtaagcgcagcgtccctcggtaccctgaggacgaggacaaaggcggttgctgtggctgcctctgctggtgctgctgtttcctgttgctcatcgtggcggtgctggccggcacagccgcctacttcttcttcgtctacaagcccaaggcgccgtcctactccgtgagcaacatgtctgtctcccagttcgactttaaatcctccgacttgacgctctacgtcaagctcacggcctccgtgcgcgccgagaatcccaacgagatgatcacca

SEQ ID NO: 460730 - DNA, 189 bp, Sorghum bicolor
cgtacgctcttttagagattgcatgattattcccgcgttagtatctaaatcctacgacatggtgcatgtactatattgtctccgggataacatctgctggaccctacaataccactggaactcgcagatggctcaggagttacgctaagtgagtaccctagagcatagactactcaatctggttgaaca

SEQ ID NO: 460731 - DNA, 316 bp, Sorghum bicolor
cgtccgggcgggtttgaggacaaaacatttggggtttcacaaagcactctgtgttctgatggggtggaattcgcatgttgctccagacacttgtaaagcccatcactccattccatccgaggaagtaaatgccatgaggggagatcttatgctgtggcctccagttgttgtgatacagaacagctcgactggtaaagaggcaaaggatactggtgcaaaggttgtgtccataaaagaaattgaaggtgtattggcagatataggcgtaccacctgagaaggcgagggttagccatggaagaccagacaatcagagc

SEQ ID NO: 460732 - DNA, 432 bp, Sorghum bicolor
ccggatcgaccggctcgaccgatgcgacctcccacgcctcccgtatctctagaccaggagcagcccgtctagactaacgccagtgacttctcccgcattagctcccccggagacggctccaacccttctgacgccaagcgcactcgcagggccttcaacaagcccccagcgcactcctcttgctgctccaagaagagcgccgcggcagagggcggcggtgacgcccgcgggcaccgacaccaccaggagaaccaccgtgagggcgcggcagcagatgaagagaatcgtatgcctagtggccagtactacggcggcacggactaagaggaggagagcgaggaagaggagcagcacttcaagcgacagtcgtcctcgtcctaccggcgtgagcgctagcatgatgcgcatgaagagcagccggcgcactcgcga

SEQ ID NO: 460733 - DNA, 375 bp, Sorghum bicolor
  unsure (1)..(375): unsure at all n locations
cgtccgctcccacctcccccgccgcccgcgtcgcggcacgaggccgagcccgccaagtctaaggccagcgtcttctcccgcatcagcttccccggagacggcgccaacccttcggacgccaagcgcagccgcagggcctccgacaagcccccagcgcactcctcttcctcctccaagaagagcgccgcggcagaaggcggtggtgacgcccgcggncaccgncaccaccagcagaaccaccgtgagggcgcggcggcagaggaagagaagcgtangcctggtggcgagtactacggcggcacggacgaaaaggaggagagcgaggaagaggagcagcactttaagcgacggccgttctcgtcctcccggcgtgag

SEQ ID NO: 460734 - DNA, 172 bp, Sorghum bicolor
cgtccgctcgatccgacgacctaggaatcaaatccaaccctacccctgcacgccacatcataccgtgtctgttgcgacagctagagggtatggagtgaccgtcgctatacaaccttcttactgctaaaaccctctctctacccaacataatagtcttgcatcatattcccct

SEQ ID NO: 460735 - DNA, 398 bp, Sorghum bicolor
cgtccgcgctcttcccccctcttttcccgggacaagcgatctctcctgtgatccttttcttcctcctcgggggcgagtgatttggcgtttgtccctctgttgcaacgaagagttctccatgggcgggggcccgccgtgctgccgtcctgcatgtcctcctgttgctcgtccacctcgtcggccacggcggcgctgccggaggagccagcaagggcagctcggtgtacccggcggccgtcgtctatgcgcatcactatcgccagatctcctggaaacccagggtgatactgtaccagcacttgctcagcgactacgaggccaaccacctgatctacctcgtgagagcagagctcaagaggtcggcggacgctgataatatgtccggcaagagcacactt

SEQ ID NO: 460736 - DNA, 168 bp, Sorghum bicolor
cgtccgctaggacagatccgatgggaccgcctggaggcacatgcatggcaatagctagctgaatcacatgggagagagagagagaggtgacgtacgcgtatacgtgctctattagctcgacggcgaccaacgaatcgaagaaaccggccgcgtggtgctgcactgatc

SEQ ID NO: 460737 - DNA, 157 bp, Sorghum bicolor
gcgatcgtcgccacctcgttctaccattactgaaggggttgctgcatcatacacctgcgtcctgcggtgaagctcagcagacccaggagcccaggaggcccaggagcagagcgcgctctcgcgtacacgcgcgcaaggagcaaggcaaggcggaagt

SEQ ID NO: 460738 - DNA, 53 bp, Sorghum bicolor
cgtcttctagatcggagcaacctctaagagcagtacgtcctgcatcagttact

SEQ ID NO: 460739 - DNA, 502 bp, Sorghum bicolor
  unsure (1)..(502): unsure at all n locations
cgtccgcccacgcgtccgcgtcgctgcagctggagcaggccgccgccgccggtgcggggacggtgacgggggcggccccctcagtgtggggcgactgtaggtctccgattcctctcctgtncccgttcgttctgttcctcatattgtccgtttgttatgtttaccattcttttctctctttagttttgtatttttatttgtttttccttcttattttctttttattctttttttgtctttctttttcttttttttttattccttttatcattttttttttttctttatttatttatattttttttttttttttcctttctttttatttttttttctctttatttttctttctacttcattttcttttcctctttttcatctttttttttctttctactcttttttttcgttttttcatttttttttttctttttatatcttttttcttatctttcatttatttttttgtttttttttttttttttatttctttttttctttt

SEQ ID NO: 460740 - DNA, 456 bp, Sorghum bicolor
  unsure (1)..(456): unsure at all n locations
cgtccgcccacgcgtccgtgccgataccactgcagccctacatagttgctaagagtcaacagccaggtctttcactaaacttggatggcattgtgagggctcctttacatcaactgccaagcttcagcatcccagggccatcgccaaatgagttgtctgttccaggcggcattcctctgccaacctgcagaattgcacctcccaatctccttgcactctngaagcaagctnggtaccagcagggaagtatcggtggtctgccaggacatggacatcaacagccaagcttcagcatcccaggaccatngccgaatgagttgtctactccaggcggcattcctctaccaatctgcagaaccacatttcccgatctccttgcactcttgaagcagccctggtatcagccagagagtattgctggtctgccaggacatgatgtcttttcttacttcgaat

SEQ ID NO: 460741 - DNA, 349 bp, Sorghum bicolor
cgtccgcccacgcgtccgcgctcctatacttcctccccgtcagaaaggcgctccacctttcactcatccacttcctacaccaagagtaggggcacccctcccatccactccacttcctccacctcgtgctcctgtccttcctccccggcggatgggcacctcaccttcccttctccatacctgcccaagataggggcacctctccatccctctaaacctcatctggctctgagttctcccgcgaagccagccactctcaccactctaagcccatccattctgtatccgccctcaaggcctcacttccttttcacaccgacagatagggcccctcctccctttaagctca

SEQ ID NO: 460742 - DNA, 164 bp, Sorghum bicolor
cgtccgaattaagtaccgatcggcaatattatattgctagtgaataaatggacttatatttgcgaagtcaaaaaaaaaaaataaaaggaaaggtggttaaatataaataaggtataatcttcaatttctaaaatttacttttttcctaccccatattattgggc

SEQ ID NO: 460743 - DNA, 281 bp, Sorghum bicolor
cgtccgcttttgtaaactgaaaggtgaggagcatttaaaatgtaactgtgtgcgtgttttatatttgtaatgcggcgctttctttgtttgtttgaggagcctgttgaataccctcctgatatactacattgtacaaaaacattagccgttatagtttgataaggttcgtgccctcctatgaggtctttcaaatgtcgagggcttgtagtttattcaacagattgaccagatctgaagtctgaaccttgcctgtctacaggtttaatgtgatgtaacttggg

SEQ ID NO: 460744 - DNA, 112 bp, Sorghum bicolor
gaccgccttcccgatcgaccacgcgtccactcgttctagatcgcagactgacactctagaggcatcaagcataccttcgcttgcatgccattttatagcatacctcatctat

SEQ ID NO: 460745 - DNA, 257 bp, Sorghum bicolor
tcccgggcacaaagagcagagccatggggacgggttctcaattcgagcacagagctttcatgatatgtcagctagaagaaggccacatgaaaatgaatttctgatggtcaggatggaccaaccacagaatgcgtggattcagactgatccaacaacatcgccatatcttgcacggacaaagcttattgcacacgaggatcatatggcgatcactactaaccttgaaacgaacatggataataactctcgatattact

SEQ ID NO: 460746 - DNA, 61 bp, Sorghum bicolor
cgtccgctgtttatttgtggatcatctggtttgaatgtgaatgtcatcacttcgaatgttt

SEQ ID NO: 460747 - DNA, 317 bp, Sorghum bicolor
cgtccgcacctgtagattttggcattgacaagtcaatatttatcaaaccgaaaacatttcacctgacggttcttatgttgaagttgtggaacaaggatcgtatagctaaggccgcggatgtgctccagtcagtatctaccaaagtaaatgaagctttggaaaatcgacctatctccatacagcttagaggtctgacatgcatgaaaggttctccagctaaagctcgggtggtatatgctccagtgctggaagatggtggctaatggcgcctaccacgtgcttgtaaagtcataactgattgcctttgtcaagtcagg

SEQ ID NO: 460748 - DNA, 300 bp, Sorghum bicolor
cgtccgccaggatgtcgcgctcgccgtggaacgccagcagcgccgggaagatcgccgccagcgcgccgcccaggctgtggcccgtgatcaccacgttggcgttcgggtgcttcttcagctgcgcgcggagctcctcgcggagcgtgtagtatgctaagggcttgccggcgacggcgttcggcgcggctttcgggaacgccttggcggcgtccttgccgtcttcctcctggaggccgagagcctagaggaagccgacgtggacgtggcccagaacgcccatgcctagccatgacagggtca

SEQ ID NO: 460749 - DNA, 383 bp, Sorghum bicolor
cgtccgcgacgagcacccgcaaggtatgcccaccaagtggatccacgaaggatggcatggcctcccgagtcccgatatgcatgaactatggcctctgcattagatttgtaatgatgaagctccttcctcgagcagggctacatcgagctataaagcaggaggaaaaatgcctacgttctgtgatattttcagtgtgtggagctgatacctgtacgccatcgactctatctcagtactagcaaaggtgattcatcttttctcatgcagatttgttcatttgtataatcaaatccattgtacaagtgcagatactgccagctacagagaacctgatacaagtgtgccaatgactccatcttagcactagcaatagcataggaaaa

SEQ ID NO: 460750 - DNA, 73 bp, Sorghum bicolor
cccacgtcgtctcggactagacaacccatggcgcgtatagacgaacaatttttcgtgtcgactatgtgcatca

SEQ ID NO: 460751 - DNA, 141 bp, Sorghum bicolor
cgtctcgtaggcggacggcctggaagccagcggtcagcggttactgtgggtggtacgggcgccgatcagtgacgactcgggtaagatgattgcgatgcactcggcgccggatttgaacgcgctcattccgaagacgctgct

SEQ ID NO: 460752 - DNA, 340 bp, Sorghum bicolor
cgtccggcaggatcaacagacgtcggcaatgccaacacaaagcatgtaccaccaccagtatcagtactctgtgcctccatctgtagctgcaaacacgtttggtgatcctttcagtgaccttgccccaatggagtgctcctggaaaacagagcagctcatactgttctctgaactggtgctacactgtctgatcattcaattgagtagagcagcaaacctgtacaggacgagtctattggctgactggatgtgttgtatattaactaacttttgcaatatacagatcttgaaatctcacatgaattaatagcagttatatgcactataaaaaaaacaataa

SEQ ID NO: 460753 - DNA, 435 bp, Sorghum bicolor
cgtccgggctgatgatctctagtggtcttttcttgaaagggaaataattttttgcccatgtggctcatgatgaaattgatttctcatataagttggaaatataggctgatgatctttggcggtccagggcatgttcatgtatatatatgtattgttatctatttatttatcatgcttcatcaattccctgaggtcaacatattgcaacttcctcttagggctggcagtacacttagtgctgctaattgtgcctaactaaatggtgatattttgtatgtgttaccaacttgaatttttttgtaaagggcgctattctcagtgcatgccgttgtgcctaactaaaggagatcaaatgatgccattttgggttcatttctgaaggtactcttgttatctacattattaatggtttcttattggactgaattcttatat

SEQ ID NO: 460754 - DNA, 403 bp, Sorghum bicolor
cgtccgcctgcttggaatggaaggcatattgaaattgttagatccagcttttctactgaaacgtaaatgcactgtgtatgtgtatcatagtatctcaactggcatagagtaaaatactccttgaggtctactatgtactgtgatagttcctaggagttaacctgaaccttttagttatttattgatttattgctagtattgagagaagggcatgattatgctcacatctgccattatgatccaagtggttggagacatctctttagttttggggtgatcagtaaaagatcaagtaacaaatcactacctgaatgctgttatgttttgcacgatcaatcttcgcttagcatgttatactttaaaattttccttaactatttctttagggaaaggcttctgtgtg

SEQ ID NO: 460755 - DNA, 420 bp, Sorghum bicolor
cgtccgattgctccctaccctatcggcttctctgttgccacgttggctccatcttcatcttccccagaatatatttcaaccaaagatccatctatcaatcaagtagcatcaccagtggcagcacccgaacctgttggagcaatcttgccaaaaggggtattccctccggataccattatgcgaactcagacttctacaagtgttggcagttcaagccctggtggtggtcgctgatttttctgagctggtgggagtgatcctctcagcacaatttttctatcacttgacacagttctgataggcctctccaatgtgaataagaagctgtggcctctgtagagaagccgcggtgagggtggttttctctaccatcagaataagagagcatggataggttacaagcaagctcgattcacttgc

SEQ ID NO: 460756 - DNA, 101 bp, Sorghum bicolor
ccggaatgaccggctcgtccgagcgcgttcgggcggcgatacgactagtcgcacagcgaacttcatggagctgaaggcgcagcgctccttgccgttcattg

SEQ ID NO: 460757 - DNA, 96 bp, Sorghum bicolor
cagtaccgtccggatgaccgaggtcgtacccacgcgtccggttcccttgtgcaattggatgatggaggaaatcggtgcgggtgtagaaagctcgtg

SEQ ID NO: 460758 - DNA, 196 bp, Sorghum bicolor
cgtccggtcgagttcgacactgggaagatgctgtctttcactccgggtcttggacagcaactgaatgctagtacaaactttggcgatctgcagctcagtcaaaaggaattcagcggtctgcatcacctgaacctctctgggcagcagctcccgtcgtttaatgcaacaggagcgacgcataatcctgaacagtcta

SEQ ID NO: 460759 - DNA, 214 bp, Sorghum bicolor
cgtccgagaggacatcgatgaggttattgagctcactgatgcgcctactaaagtggcagagaggcctgtatcttctagaagagaccgaagttcaagaggatgcactacctgcatcgtggacgggactgagatgactagggcacactcagagtgcatgaattgtaacatacaccaccattctatcgtaccatcgtattagcagacatgtcagaat

SEQ ID NO: 460760 - DNA, 288 bp, Sorghum bicolor
ttttggtttggaattcttgaaattaatatataataagtagtccactttattgcattccaatgcgggttataccatgatgatccgggcttggttgcgcaattgccggaggcaaagctatttattccaacgggtttatttattgaatcacgccatggatgcattatttatattaagggttggtattacatgtgcactgtagtacctgatgagggagggggtgaggaaagggaccattaatcaacatgcgaccaactggtgtttactcttaggtgcctaatcggttttctt

SEQ ID NO: 460761 - DNA, 187 bp, Sorghum bicolor
  unsure (1)..(187): unsure at all n locations
cgtccgcanaggccttgctggcacaaagcatagtgaagaaggctcctagccaaatcagcgtggctactatcgttacctacatgatcctcggcatgctggtgtgatcctctgtttatgctggctacagataccctgataggcatanggaccagtgggaggcagtggggcatcgagggggattaattcc

SEQ ID NO: 460762 - DNA, 428 bp, Sorghum bicolor
atggggagcctaagttgattcgttgatgtgcaagctgaaatgagacgcctgatactagaactaaaacagacaatgtatatgtataactctgggggtaaggaatctattgatgcctaacatattgcatcacatatgctccatattattgtagatgagtccaattagtcctagaactactgaatgcattagaggaagctcttgctctatgttatatggataaagcaaattgtacagctgttcttgatacattataagctgcacagataattgcatagctcgaggcgcacaatagattgagagctgactgtgaatgcattacgctatgctttggataggtagaaagtatctgatgcactgaactataatgatatttctgacatgagatactacatagatgacattagatatcttgtacacattattttgat

SEQ ID NO: 460763 - DNA, 522 bp, Sorghum bicolor
cgtccgtgcaaagttgagtgtttcatgggcccctgatgtatatgaccctcctattacttctgactctcacactgtgagagggcaccataggagttcaatgaagagcaactacaaatacaagtcctccaagagcagtagccgcagtaccacgggaagcaaaaaggacaagaagcattctaggcacagtagcagcagtggtggcggcagcaaaagggacaggaagcattcttcccacagtaccagtagtgccagcagcagcagagctgttaccagtggttctcaatatcgtaacacatactgtggtgacgggatcagcagcagcagaactgtgacatgtgttcctgagtctgccaaggtatctccattggtgttagctgaaaatgccgcaccgcaagagccggttcctgtactcaagacactggaaccaatcaaatgtgctaccagctgcagcaaagagaagccatttgccttactgtcacgccagttttctcctgcaaggtacaaggggtgtttccttttgga

SEQ ID NO: 460764 - DNA, 154 bp, Sorghum bicolor
cgtccgatcatctcttctctatcactctttactatttttctctctgttgtcactaatttcctaggacctacctctggtccgaaagggggtagcatttctttaggaggctacttacaccttctagttttcttaacctatcactaatgtatcagta

SEQ ID NO: 460765 - DNA, 168 bp, Sorghum bicolor
tccgtattcccggtcgacggagcgtgcgctcaagcaccacccggtctccatctaggtcgtcgccatcatggagcacatcctggactgctagggcctatatgtaagccgcggggaaggggaacgaggtgggcgcgggtggtgaagcctaatcagtacaggtactctctt

SEQ ID NO: 460766 - DNA, 159 bp, Sorghum bicolor
gtcgaccacgcgtccgctcgtagacaaaaaaaaaaaaaaaagctctcgatctacaagatccacgctcacgtaacacgcgcatgcaacgtgggcgctctcttttaaggttccagggttactaatctcctgcatcgcgactaaataacttttttatatggc

SEQ ID NO: 460767 - DNA, 419 bp, Sorghum bicolor
gaactcataattctgccgacagtagtatgttgatcctgagcgacaagacagggagaagcgttgattcttgctagaaaaaatctttctcaaacaacaatagtacaatagacatattgggtggtggcagcccgcactctctcgttttatttcgacagagcagagcagagcacagttgcgttgatattcatcagaattcgcggcaaatgtatgcggacaactacgctccaattccagtcaattcttgctggtttcaggaggcgggaccgaccccaggaactccttgaggagacagttgtatacccacggctctttcaggtgcaccacgtggcctgccttgcttatgctctgcagtatcggcttatctccgagctggtgtttcatggtcttggcgagctcaatgtgctaaactgtgccggtct

SEQ ID NO: 460768 - DNA, 206 bp, Sorghum bicolor
cgtccggctatagatagagagcgagcggtctatatgaaagaaccaaacttacgcacgcatgcaagctaatagatattttatagagagagctaaatacaattaactgaccggcggtcgacaaacaacggactgacaaaaaaatggcggtactcaactaaatcaattggcatgacatacatctttcgtcagctggctggataaaaagg

SEQ ID NO: 460769 - DNA, 268 bp, Sorghum bicolor
cgtccgtaattaaaaaagaacatatgtatatataccaatgtagaaaaacgcactgtgatgtcacaagctagcgacactgacagacacacaggggagggaccgccagccatgcacgcatgatgctcggaagaatctcaagctaggaagctagtaagcgtcgaacggaccgatgcagtcggtggcgacgtcaaccaagtcggccatcggctccttgagcgaccagggcaggaccaggacttgttacatgaggccggacgacctcgggctg

SEQ ID NO: 460770 - DNA, 412 bp, Sorghum bicolor
  unsure (1)..(412): unsure at all n locations
cgtccgatccaggccgctttccgtggctacctggcgaggcgagcgctgaaggcgttgcgggggctggtgaagctgcaggcgctggtccggggcaacattgtgcggcggcaggcggcggagacgctgcgatgcatgcacgcgctcgtccgcgtccaggcgcgcgcgcgcgcttgccgcgcaattcgttcgcagcgtgtcgcggctcatccggatccaccgacgccggagaagtacgatcaggcgggtgcgcccaggcacggccgttccggctctctgaaggcaaacgcttcgaagacaccgggcggcgagaggctgggcagggagaggtcagaatcttgcgggaggaactggctggaccgctgggtggaggagggacatggcgacgagaagacgncaagatcctgagtggaca

SEQ ID NO: 460771 - DNA, 523 bp, Sorghum bicolor
  unsure (1)..(523): unsure at all n locations
cgtccgcccacgcgtccggaggagctgctggagaggctcaaggaggagacggggctccacgacgtcatcatgtgctcgcggagccccatcaacgggaagctcctgccgctccgactgcagctgccgccaaacaacgccgccgtgcatatcgtgcttgtgcaccagtcgtccaaagtggcaaaaagttttgcttgatcaattgaccatcccgttcacaaaatcatctgatcgaagatggtggaagcaacggcttgtgtatcaaatgcagaattggtctcacctaatgtgtatatattaactttctgattaaacctgttccggtggctaacataagcaagtgtacttcttctgcctctagcggttctcattcgtcatcatattttctttgtctgtagatgtgttccatctaattctcaaggttcatagtgatgtttgtagcaagaccctttgaaatttccatgctatttattntctaagttcttgaaaggattctttgaaagtttctatacatattggttccctg

SEQ ID NO: 460772 - DNA, 416 bp, Sorghum bicolor
  unsure (1)..(416): unsure at all n locations
ggatcgactccagcgcgtccgtaaattgctnataataatataaataaaaaaaaaaaaattaataaagaaaaaaaaataaaataataatgtataaaaaataaatccggggaaagtgagtaataatatatataaaataaaaaaataaaaatttattaaaaaataaaaaataaataaaaaaatttaataataaattatggggggggtgtttttaaagtatcaatttttattactggttttttgaaaatttatatttttttttatgggcctttaaattaattttactggccgtatttttaaaaacttttgttttgtaaaaacttggtttttcccatattaattgtttttgaaaaatttttctttctttggattggggttttttaaaaaagggtctaacttgatttcttttctaaaatttt

SEQ ID NO: 460773 - DNA, 240 bp, Sorghum bicolor
cccagctcgaatcatgtccatataagataacaggcagcagcgtacacataaaaaccactctggggtccctaatattaaataccaaacttggaaactgcatcctaagtaaggggaacgaggggacacatattgatttgcgggtcctgagagagacatgttgagattatccggatcagatagacattattattaagctatctttcacgcaaccgggatactgatcgagggaccgatcgaaac

SEQ ID NO: 460774 - DNA, 310 bp, Sorghum bicolor
  unsure (1)..(310): unsure at all n locations
cgtccgtgtgcatgctggaaacctatggttgctccgtgatgggcgaattggttttattgatttcgggattgttggtcgaatatctccaaggacttgggcagctatggaggtctttttggcttcttttgcaactgangatatgatgctatggctcgccttttgaaatggtgctcagaagattaattaatgattgaagactgaaaattttatatcagatgtactgatatgtgacacaggcctatctcaagttgtatgtgctgtaaaaataagttttttgttgtgggacagctatgctgaatctaagtgtttt

SEQ ID NO: 460775 - DNA, 63 bp, Sorghum bicolor
cgtccgggcctaaggactttggatccgctgtctgggacatgatcaggggaaggggcccggggt

SEQ ID NO: 460776 - DNA, 629 bp, Sorghum bicolor
  unsure (1)..(629): unsure at all n locations
cgtccgaccaccaccaccacttgctcctccatccgaggcatgaagacgagcgcgatagcgagcatcggggcgcaccagctgcgccgcgtcatcgtcggcgacgaggcgcccaataacaagcagaagcagcaggccccgatgacggtcttctacaacggcgccgtggccaccttcgacggcgtctcccaggacaaggcagaggctataatgaagatggcgatggaggttactacctccaatggaggccgcgtcgtccgtggcgacgcatttgctggaaatttgaccaaagacatgccactcacaagaaccaaatcgctgcagcagtttctgcagaagcgaaaagagaggctgagtgggttgggtccgtatcagctgggaataatgggatcgggaggaacgagccgcgttggtgcagcgacaaccaacaagtcgtttcatgtgaaggaggaggcagcttaacctagcagccgccaagctactaattcaagaagtatattncttgatactttgatagcagtatcgacaaataaatagaagatccacagtgatataagttcgtttgataatttcattaagattaagatctagagtgatcataggcatatgtatgtnggtatatatataaatat

SEQ ID NO: 460777 - DNA, 271 bp, Sorghum bicolor
acccacgcgtcgcgggcgaccacgcagagctgaccagcgagacccagcccgacaacaagcactcagggcagggtgacgactcgggcgccaccgcggggcagggggagaccgaggccgccaggagcgccagcgacgagcacacaaccatcggcaaggcggcgcacctgggggacagcaccaacaacgagggaggcacgaccaggaagggcagatgaccaccgcgctagaccaggagggcgccaaggaagcggagcaaagaggccgagggcgg

SEQ ID NO: 460778 - DNA, 449 bp, Sorghum bicolor
  unsure (1)..(449): unsure at all n locations
gttgcagcgggaggaggggaaggtttctgacaagtctagttctgcatgggcttcggaggcggtagcaacaatggagatgacacactcgaagctcttccccttcttcatgactggtctccttcctcaggaggccatgcaatacttggacctagtgtgccgatgcacgaagaacacgcgccatctggtctctatgctcagatctcttgcagagcgccttgaagacgcaaacccgtcaattatacacaacaaccctaccaaactgtatgagcacctacttgtaaagtccccataagcctgaaacccctctgtgcagcgatgcggcatgtgttaaattgtgaatgctaacctttnttttcttgcttgtagtgcagctaatgtatntgagttatttgaacgattgtgaaagccgtgcgtgtatagcttatngtgttatcccagcgtgagtaact

SEQ ID NO: 460779 - DNA, 207 bp, Sorghum bicolor
agtaccgtccgtattcccgttcgacccacgcgtccgattaatttgttgtacaggcccggttaaaaaaaaaaaaaaaaaaaaacaaataaaatataaaataaaacatataaaaaatataagatcagggctgcccattctaaaggaccactttcttccctacacgtgacttcctctccttaattttcctataacttcccctaaatctaa

SEQ ID NO: 460780 - DNA, 73 bp, Sorghum bicolor
cgtgcggtactagtgctagcgggcgagctagcggattcgagcatacatgctcacgcacgcgtagcatgctacg

SEQ ID NO: 460781 - DNA, 473 bp, Sorghum bicolor
  unsure (1)..(473): unsure at all n locations
cgtccgcaactatgtgacccaactgagctttttgctgtcacgcaaggctgcaggcttggtcagcctccaagcacgcttggcacggttccagcaccgcctcaaagagcaagagatccttagccgcaagaaaccttccagatagtatgatcagtgatggctctggccttttgcctggtaatctgattgctacagctcagttgtggtccatcagttgttttttttacctgtgctccagcagtaaatgctagccccaagcaacgcagtgatagaagacacatgggagtgtcttgggggcggttntgatggccgtggacaatttgggtttgtcagggttggtaaccagtttggtaatagtcctttntacagtggggctgcttgggtgtggttttttttttttggcggatgtatggcttgcccactttgtcttttttttttcccattttggacgaggagaaattggaactgttgtttgc

SEQ ID NO: 460782 - DNA, 66 bp, Sorghum bicolor
cacgtgctatgctatcgtatagcgtctacctatagtgcaacctactggccgttgactgacaccggc

SEQ ID NO: 460783 - DNA, 387 bp, Sorghum bicolor
cgtccgcccacgcgtccgcaacaataacagcaacagtaatgctggaggagcacctagctggatatgacctcactgcacatctaaacgctgcctgtgacgtgtctgaatgtagataatcggctgtattgtctgctgaatttgctagaatgtatgcaattctggcgtcagatgtagtactctattaaagccttctccaccctgtaatatatacggtttgttgaactgtatgtgtggtatatgggtttgatctaaaggagcaaggtcgcgtacaggcacacctgattgtgtagttggataggaagttctaccgcttgtttgcactctgcagcaaacattttggagtttgtaagctatatgttcgggcatatccggtaaaattgggtgaac

SEQ ID NO: 460784 - DNA, 460 bp, Sorghum bicolor
cgtccggcggcggcggtggctacacgcccgcctactctggcaccgggacctgcgactactggaagagccacccggacgcgatcatctcgtgcatcgggtcgctgggcagcatcctggggtccctgggcgacgtgtgcagcgccttcttcgggagcaaggtgcagacgctgcaggacgcgctgtgcaacacccgcagcgactgctacggcgacctcctccgcgagggcgccgccgcctacctcaactccgtcgccgccaagaagcagcagttcgcctacaccacgcagcaggtcaaggactgcatcgccgtcgggctcacatccaaggccgccgccgtcgcgcaggccgccatgttcaagaaagccaactacgcctgccactactagcagaccagccgggccggccttttatcatgcatgcatcaccgtttaacgtacgtagtggttcttataaataatta

SEQ ID NO: 460785 - DNA, 463 bp, Sorghum bicolor
cgtccgagaatatccaagaagcagtgcgcaaagcgcgcctcaacaagagcagagagttgtgaagcaggttgctgaggataaactgttgaccatactggcactggtatttccatgtttcgactcatgctgctctgaaaccagatcgaaagattaagttgcttttgcgatgattcaatcctggaatactgggagatcaaccacctttggctagatcggcatggagttccactgcaagggtgtgcccagcatcttctgaaacatcacccacttgttgttgtgccctctgctgcagcgtcgtcgtcttcttccctgaagcttcgaagcagatatcagtggtagcctggtaggagaggctgatggtgtggtgctctcagctaggcttacaccccacctgatcctctagatcatttgaaaaattggcacagaaaggcttttgacagccacacttttgctggacagacag

SEQ ID NO: 460786 - DNA, 343 bp, Sorghum bicolor
cgtccggcacggagagcagacgcgtgatggtgatgcttccagttccagcgaacggatgcgttgctatttgctaaacagctagccgcaggcctcaggatgaactcaggagtcagcactactcgatcgtgctcgtctccttcccctcgccatattagaatgcgtggggtgtcctagctagtgtgtgtgtatatggatagatataatatatgggcatcattagaaaaggtggtactgctgcatatatagtggatcatgctgtactgctgctcgatggcttaacggtctgtactactagctagatgcttgcagttgcaggtagatgctctcagacgatctgaatgtg

SEQ ID NO: 460787 - DNA, 317 bp, Sorghum bicolor
cgtccgggatgataatcaggctaagaaaagcctgtattttgcagagcttaaatttaatccggttcttctggagttgactgaatgtgctgatgatgtggagaccatgtgtgtcagctctgtccataatcttgatcattcttgttttggtggatgtcatgagataaataggaaaattgattatgtgatgagtgggaatcaggactacgagcgttgtcacgcatgtagcgatcgtatcaagcatccacatgggacaaaatttgttgcagggcatgatagttccaagattccgtattacactgcaggctgatgtcacaagt

SEQ ID NO: 460788 - DNA, 57 bp, Sorghum bicolor
gcttcccgcagcttaatcgggctccttaggtcgatagtgttacgactccccaaaact

SEQ ID NO: 460789 - DNA, 537 bp, Sorghum bicolor
cgtccgcatgaatccagttctcaaacgaaattacactgttagagaggatgcatatggggagattcgaagagtcaggccaaagattaatggaaattcatgggaaaattcaaaattcaagcaagttgatattattcgaaataatccagctgcaaattcacgtgaagagcccactgccaggaatccgagtgcttccagagatggaaagaagctgttaaatgatattctgggagccaacaatttaagataccctaactttatttcaaaagttgaaactgctgatgaaatattagatgtccccgataaaccttcagctgtaaccccacaacaatatgattccagtttcccgcaagctggtagggaacaaaaaggttttggtgctacaacacttaatcagtgttctaatgaggacctgaagaaaggctttgctttgaaagtggagcctttgaatgcatttcttcctttcgagcagcagatgatggacttatcacacaggaagcaagagcatgctgcctgtgatgattcatgctctctctcaaa

SEQ ID NO: 460790 - DNA, 495 bp, Sorghum bicolor
cgtccgctttgagagcgttaatgcttggaatcttggatgttaggagtgatggggcacaccttacaatattcttccatctaaccagattggagctaaggtgtggatgggatggttaggccttctgagttctagacgtttccacctatggagtcttccttccagtgataaataatcctttgcataaactttattttgaagctgcccttaacccacatgcctcaactgatggtgcaggtccactatttgtgttgatttccaatccaatctgctgtttgtgacaatggtcctccctttttttgaacttcgttctgcaatttcctcactttgggcttccatctggtgcatctgctgtggatcaaaaccgagaaaggatgttgctccttatgttcctcccaaagaaaatctgtctgaacaaacttgtttggttgctcttgactatgccagcttatattcccatcttggtgacgcagtgcaagcttttctgtactttggatg

SEQ ID NO: 460791 - DNA, 262 bp, Sorghum bicolor
cgtgcgttcttcgagaagcgcgtcggtgactaccagaaggcctccgtcatgaacagcctcaacggcagcgccgccgccaaccacggggtgagcgtcgatgaggacttctgagttggtgcgcttaatctattccgccgataatcttattatttgcttatcactagttcttggaggtgtggtacatgtactctgtgccgtgtggtgctgtttcatgttacggggtattggaacttgctcctggtgttatgtatatgcaatcgaa

SEQ ID NO: 460792 - DNA, 157 bp, Sorghum bicolor
acagcgtccggccagcgttcgattgaaagtgaccgctaatcaggagtactggtcggatcgcgccgaggtggagcacgcgtacaatcctatcggggtacgagagcgacctcgagtgcgtgatggatcgcttcaaccgacggctgtgcacaaggctcat

SEQ ID NO: 460793 - DNA, 405 bp, Sorghum bicolor
tccggattacccatcgaccacgcgtccgtgggccaaagtaggccttcttgttgaacttgtttccacttctaattccacaatcgaagggtttccaataaagtcaatttcctatggatcatttaccaaacttgttagactatggtgttgtcattcaattcaccgaaacccactagggggctagatgcactttaagtgggtccaataggattaatatatttaaaaaagatcatcctcaaggaaggcaacctcaaagccttaacctagctaacctgtggcctgtgcctgcagttgccgttagggaccgtggctgcctgtcctccaccgatggtggggcggccagccgaggctagaccatgatggggttaatgcatgtgcctcccctgcatgctcattggcggttcgtag

SEQ ID NO: 460794 - DNA, 271 bp, Sorghum bicolor
tgtgattgtatcgtcaaatggagatcatgcctcactggatgagatgcttgccaagttgaagtctctgaccacggcggggggagccttctaatgccctagtgtgtgggcagtcttccgtgagggagactgtgcctggtactgtcatagagcatccgatctttctgtcagtgacccctttgattggtgaaactcaagcggttggcatattccatgaccaatgctatttttctcctgagcttgttcagatgtttttattttgtcattcatactt

SEQ ID NO: 460795 - DNA, 440 bp, Sorghum bicolor
cgtccgcggacgcgtgggttcgaaagctacctctatggccaaaaatagaggcatgtatcacactactttgacatcagctatagtttctaccagaaacattactgaagttacagaacatccaataattggtgctaataaatactaaagccttcatccaccaattagcgattgaaactgagcagactcactgaagcaccacagcataggtcaatcatgactattggcgcatatgcctgcatcaggcactgggagaacatgaagatcaatgctgaaactgaagccaagtcctagcaccagcagagttcatacaggacaaggcatggcttaatgtgcgctggaaaccatcgaaagtgggccagacaagccaaaacactctctttctatagcatcacgagctaaacagcttagaccgcgcatgcgtagaaagcgcgcctatgggg

SEQ ID NO: 460796 - DNA, 292 bp, Sorghum bicolor
cgtccggtactctaaatctctaatagagtagtaaggtgtcgttccggccaggatagcgaggagctgaataatgaaatgaactaccagattcctccgtgactatctcagtacacgtagacgcgtgtattatcaataaattttgttctgaagtaaaaaaaaaaaaaaaaaaaaaaaaaaaaaaaaaaaaaaaaaggaaaaaaaaaaaaaaagataacaaactaacaaacgcgtgcatgcgacgaaattaagaaatactatagggtaacctaaatattggtgcgctggccttaat

SEQ ID NO: 460797 - DNA, 441 bp, Sorghum bicolor
  unsure (1)..(441): unsure at all n locations
cgtccgcggacgcgtgggctgaacttcatccaggctagacttgaatagccatcgttgttctaccatccaggttagatccgaagtctagataatgagaaaaaagtgacaacaagtcaagtgtttctttctatttttcagagcataaatacgagattgtaaaatgtctaggggcacaaaaacacatttgttatatacacatcttcagagtgtatctgtgtaccatattgctcaccatattttgtctttgtgcccaatttttcttgtgcttgtgtatgtgcacgcgttggcgcgcctcttcactagtgagtgtctatatgggctgtggtgggctggtggcagtggcatctcanatgaatactagatttgcagtatgcanaatgaatttcagttgctagctgctagccttagattgcacaggttgttgcaatcattttccaactt

SEQ ID NO: 460798 - DNA, 491 bp, Sorghum bicolor
  unsure (1)..(491): unsure at all n locations
cgcgtccgtaaaaaaaaaaaaannaaaaaaaaaaaaaaaaaaaaaaaaaaaaaaaaaaaaaaaaaaaaaaaataaaataaaaaaaaaaataaaaaggaaaaaagaaaaaaattataaaaaacaaagtgaaaaaaataaataatgggggggggccttttaaaggaatacaaattttttgtccccttctttacactttaatatttttttttttgtgcccctaaataaaaattaatggccgggcttttaaaaaactttggctggaaaaacccttgccttaaccaaatttaattgttgtgaagaaaatccctttttcgtaggttgggttaaaagaaaaagggccccccccgtacccctttccaaaaaatttcccaccttaaatgcaaatgggaaccccccttttatccctccttttaatcccgggggggggggtgttttccccccaggagaccctttacttttacggggtcctatccccccggttttttgttttt

SEQ ID NO: 460799 - DNA, 387 bp, Sorghum bicolor
  unsure (1)..(387): unsure at all n locations
ccgattcccggtcgaccacgcgtgcgggtcaaggacactctgccccancagtctccatcatccccgctcctgccaccgttccttctgacttacaagatctgtatctgggagggtgactccaaggtcacctgcgaggacgtcactttcattatcatcaccgagctctgagtggtacccaggtcattcgcctgtcacatctactccgacaaaattccctgcagcggcgtcaccatggataaccatattgctcaccatattttcgccaacatcaagaccatggtcgtatctaacaacgcctagggaagcgtcacaagcttgctttaggaactgttcgaggactacgacgaactactttattcacttgatgtcactgatatattagatctt

SEQ ID NO: 460800 - DNA, 258 bp, Sorghum bicolor
cgtgcgggtttggaaagtgatgatgatgacaaaataccagcaacagggaaggcataagatgcaaagtagttgtctatggtttgagggttcgagagatgacgacaatgatagcgaactttatagttccaagatgatattgtatattagttgattgcatgccatctattcatttgatctctaccaattgaggaatgttacgcacttatggttataacagttttggatttatgtactgaacttaagacatctatattaatg

SEQ ID NO: 460801 - DNA, 388 bp, Sorghum bicolor
cgtccgagttacttcacaatcttttaatattattttcaaatgaaaaatagtaacgaaggtgcacatcagaagcccaattgatttccaaaaccccatttcagagatgatgttattccagtttccaaacctaataatgatcatttcttattaatatttactgttgtttctttgctgaattatccccttattattttttcttcctctgtagattttcatgggcccagaggcgtcaaacagcttcgtttcttccaggtatcgcaccagaaaatctttctttactttatcctctactggcattcattgcgcacctctgttaaacatttggtctgaatcttgcaggcgaccacttggtgttcttcatactgaacatcttcacactcaccggtct

SEQ ID NO: 460802 - DNA, 95 bp, Sorghum bicolor
tcgaccacgcgtccgaaagttgtatgtatgtatgtataatgtcaaagggaaaaaaaaaaacaaaaaaaattcaaacatatatctattttattttc

SEQ ID NO: 460803 - DNA, 439 bp, Sorghum bicolor
  unsure (1)..(439): unsure at all n locations
cgtccgggagaagtgcaggtatagaactacctgctggaaggtatccaaagaatggagctactgacatgataagggcaaattatcatagtgaggttggaagctcaagcagtactccttttggtgttacatctgatattgtgacagcatatgctgattcttttaaagtagagcttgggcgtaatgattttgagaagacagctatctcaaaaagggcagataaatttttaaaatggatgtggagggaatgctacaatcaggaattgacatgtgccatgaaatacgggaagaaaagatgctctgaattgttgcattcttgtaattgctgctatcagatntacttagccgaagaaaggcactgtccttcttgccataagacattcanatccatttacaatttttctgatcatacaacacaatgcgaagagaaacggagaactga

SEQ ID NO: 460804 - DNA, 85 bp, Sorghum bicolor
gtttctaaaatgttatattttatgttttttgatatattttttttttgtttattcttaaaatttaattgtttattttttttttttt

SEQ ID NO: 460805 - DNA, 75 bp, Sorghum bicolor
cgtccgaacaaaaaaaaaaataaaaacaaaaaatataaaaacgggcgaggcgaaaaaaataatggggggctgatt

SEQ ID NO: 460806 - DNA, 60 bp, Sorghum bicolor
cgtccgggtggagtggttgtcgggcagtccagcgatgggcatcagttgagtatcaaaagt

SEQ ID NO: 460807 - DNA, 178 bp, Sorghum bicolor
cgtccgcagggagctgacggtgcggaagacgacgctcttcaccccgggggacgggctggaggcgtacgaccaccggaacggcgcgctggcgttccgcgtcgagacgtacggccgcggcggggcgtgcgggggcatgtccttcaggggggacctcgcgctgttgggcgccaggggggag

SEQ ID NO: 460808 - DNA, 71 bp, Sorghum bicolor
cgtccgaaaaaaaaaaaaaaagtagaacataaataatataaaaaaataaacttaatataaatgaaaatggg

SEQ ID NO: 460809 - DNA, 199 bp, Sorghum bicolor
acctcaacgggctcgtccgggagcccaccgacgccaagttcctggagctcaagtcgtggctctcctccacgctcggcggcacctccacctgcgaggacgcctgcaaggacgcgcccaagagcggcgacaaggacgccgtcgtcaacttcagcctcgacttcgagaagctgcagcgcgtcacgctggacctcatcaccga

SEQ ID NO: 460810 - DNA, 237 bp, Sorghum bicolor
cgtccgccctaagacaaagggaactacatatgtttatgggactttctttaagccatatatttctcagcatgagaatgaaatcgaccggaatctccttgagctgagagctcgagccaccgatatggttgtcatttatttccagaaggctgcttcggtaggacaaaatactttctttgacgttttaaaatatgttgctgccagtcacctttagaaataagagcgcctcagcagatacag

SEQ ID NO: 460811 - DNA, 459 bp, Sorghum bicolor
cgtccgcccacgcgtccggtctgatagcatcttggtgtgaacagaacggggttcctgttccatctggaccgccagaatctcccaagctagaacacctgagaatttcatccctggaaagcagcgcatgttcggcgacccatggcgctaacgctgttttgttcgaagacacagctgacaaggataatgccaagtcggagagtgaagtttccatggagatgttgtctcgtcagaactccggagaggccacctccaaactacgtgtacatgaagaagtctcaccggagaactgctctctacagagctccaaggaggttgcacctgagatatgtggggttgaagactctgtgaagaagagtgctcatcagaactccaaagatgatgtgccctgcagtgacagatgtgaacagtggctccatgtgctgaacaagaacgatgctgagagtatgagtgagagacata

SEQ ID NO: 460812 - DNA, 362 bp, Sorghum bicolor
cgtccgtttttttttttgacgtgaaaaataggtgatacatattatttgcttcatccttcaacaaggcggagaaaatcgcgtgtgcgctacacagtactcagtagaaaccaaagaacttccaacgtgctgcatagggtcatagattcagtacacggcatccattccattccattccagacgacagtaagcaaccacctaacaatgcacgattaacacctagtacagtacagcaagagctacagagtcttgacaccacctacaagctactgtactgctgctgcttctccctccctgagtgagctttcgttcatccttcagccgctgaaacactcttctttctgcagttctaccacgtctagatc

SEQ ID NO: 460813 - DNA, 439 bp, Sorghum bicolor
cgtccgttcgagtctgatagccggagtcgcagcacagttagctttcttgtttactgcgctgaagttcttgcctccctgcctttcacatgctccgatgaaccactttacttgatctatgatataaatcgagttattcaccttagagctggaggagttgagggcaatttgaaaaggtggacttctatgtctcaaccgcaagatacggcgggtgtgccaacattgccaagagagagtcatgttgtcatgcaagagcctggcggatattacgatagtgtgggatatgtccgtgaaagggtgaatgacaacaatccttgcagtacttcaaacgtggacatggccaaagtgcatgtggatgttgacgtggccaaagtgcaggtggatgtggacatgaccaaagttcaaggagattgccatgatgcaatagcccttcagctactac

SEQ ID NO: 460814 - DNA, 271 bp, Sorghum bicolor
  unsure (1)..(271): unsure at all n locations
cgtccgggatgatagtggatctcctactgatgactcgggtgatgaggattcagatgctagtgatagtggtggtgaaaaagagaaatcatccaagaaggaagcaagcagttcaaagccagttcagaaaaggaagcctaaggccagggatgacgaanggcatgagaagaaaaaggcaaagaagaaaaaagatcctaatgcccccaaaagagcaatgacaccgttcatgtatttctcaatggctgaacgaggaaacatgaaaagcagcaaccca

SEQ ID NO: 460815 - DNA, 115 bp, Sorghum bicolor
  unsure (1)..(115): unsure at all n locations
tcccgattccnggtcgacccacgcgtcgcgtcctattataatgtagtgagcaggacaggtgggtgctgaaaaagcaaaacatattataataacaagtgaaactatttaaacacgg

SEQ ID NO: 460816 - DNA, 52 bp, Sorghum bicolor
cgcgcgtcgcccactcgccctcatataccgttctgtgccccttcgctcctcc

SEQ ID NO: 460817 - DNA, 334 bp, Sorghum bicolor
  unsure (1)..(334): unsure at all n locations
cgtccgcccacgcgtccgaaaaaaataaaaaaaaaaaaaaaaaaaaaaaaaaaaattaaaaatattaaaaaaaaagattaataaaatggaataagggttatattaaaaaaaattattgtgtatacantttttttnttaatggggggggcctttttaaagattcaaagtttatttaccctttcttgcaaggtattaattttttttttgtgtcacctaaattaattttatttgcctgtttttaaaaacttttgaatggggaaaaccctgtttttaccaaatttaatggctttgaaaaaaatcccctttttccaagtttgcttaaaaacaaaaaggc

SEQ ID NO: 460818 - DNA, 208 bp, Sorghum bicolor
  unsure (1)..(208): unsure at all n locations
cgtccgggcggcgctgtacctgcaagtgagcatcatcagccaggcgctcatcttcgtgacgcggtcccggagctggtcgttcgtggagcggtcgggacacactccacgggcctcaaccagctcgccaccttctacgacgtttcacctactncgagctcaccgagcaggccagccaaagtcgctagacttgtggagctgcttacactca

SEQ ID NO: 460819 - DNA, 392 bp, Sorghum bicolor
cgtccgctagccatagtatgtctgcgtcagaacaatctgcaagggattggttcttaaatggcgcatctggtgtggatatgatgttgaatgggggcttaggtcatggactaaggaatatgagtttggacagtgttagttctgccaggtcgtttggacatgcaaaccatcaacaaagttttgtttctaatcctatagagctggctgccaatggttggggtggcacatggagttctggaagtacatcatcttcccgttctgtggcgtcatcactgggggcatttagagggtggaattcatctgagtcgtcctctgcaatgcctcattctgattggagaaccaatgggccagcaccttatgactacacctcagtagattggagcgtcgacacaacg

SEQ ID NO: 460820 - DNA, 413 bp, Sorghum bicolor
cgtccggttggattggagagtgcgcgatccagctagcgggccgagggagccagcagccaggaggagcgagcgggcgagcgatggtgttcttctgcttcctggtggaccagcggcggaaggtgcggagcagcaagccggcggcggggatctgctcgcgctgcggcgggtgcgctagcgtggcggacatggagaccgccaccagggtctgctacctgctcaccgtgcaccgccgcacctggcgcgccatcatctgcaccttctgcggcgccatgctcaagtcctaccgccactacaggctctactgatcagtcccgatcgatcgtgcatcgagatcgagcgctggtaattgtgctattaccggtagatcgagtcggtcagtggatgacgcgcctgctttgcgaggtgtagtgatg

SEQ ID NO: 460821 - DNA, 393 bp, Sorghum bicolor
cgtccgggcgggtcgtggctcatggcgcagcgagctcgcgcagttgatagcgggcggcagagcaagcgagcacggcgtcgttgggacgagctggacgggcggcgcgagaagggcgggcgtgctgctgcagcggtggtcggcgagcgcgaggcccgtggtgtgagcgcctcgcagcagcgctgacgggcaacgcgggcggcacaagaagggcgggcgcggtgccgccggaggtgagcgggaaaggctgcgcggcgctacgggcacgaacgagatggacgaagaaaccaccagtttcttttcaacagtgattttgccgtttctttgggccttggagcgagcggctacgttttttctgggtgaagaaatagtttctaccgttttccctttctttct

SEQ ID NO: 460822 - DNA, 446 bp, Sorghum bicolor
cgtccggtgccggcaccgcccaggttaccaacgcctgcgatttcagatgcaaggatcagatgtattgcaaccctgggatgcagggcgctatcagtggtcaggtgttgggacaaggcgcctgtgatgtcgcgagtatccagtgcattggaagtaacaagtctggatccactaagctacctgtctgtgggggaatggatacagtacctgctgtctgcttgccaaatgttgaaaacaagtgatggactcctgacagtgtttatggcctctccttttcggagactgctggggcttcccgttctgcctcaaaaggaacgctgtataaactgctagctcttctatgtaggaccgcactggttcaaactgctatgtgtgtgagttcgtcgcccatgatgcttctatggtgcctgaggcgattcaaagttgttagctctagagctgacaagaca

SEQ ID NO: 460823 - DNA, 272 bp, Sorghum bicolor
cgtccgcggacgcgtgggagcttactttggcggagcaagagcaggggcagctgcagcagcagctccggcaatggactggtccttcgctagcaagcccggcgccgccccggcgttgatgtcgttccggtcggcggcgagggaggagccttcgttcccccaattctcctcctccttcgacggcgctaagaacccggcggcctctcgtatcctcacgcaccagagatctttcggtcccgacagcacgcagtacgccggcgtgcaccgcgcgcagc

SEQ ID NO: 460824 - DNA, 59 bp, Sorghum bicolor
tcgaccacgcgtccgaaaaaaaattattgctaactcacatcttattaaatactatggtg

SEQ ID NO: 460825 - DNA, 402 bp, Sorghum bicolor
cgtccgaaaagggaagccaacgcaatcaccgcaaggaatttttctttcctacatcgcctgatcagtcgcccctgcaatctctcccgcgcggtggatttggccttcctccgaagtcgccctcgccctcgcccgctggcctcgcaggacatcgcacccgtgttgtccccgtcgccctcgccgttgcgagccgcggccgtcctcgcccgctgcatgtgctctacgatctcggtgagtcttgcggttgtatgctttccctctccctccccctccccctacgctggatgtgcagctgccaatctactaagctgcttggagccacagactcaaatctctccccactgcccctctcgtcaatcgctgctattgcgcctgtcggatcctcacctatgcctgcacgctagc

SEQ ID NO: 460826 - DNA, 110 bp, Sorghum bicolor
gtatagcaaaggccgaccgacgccttcaaagtgcagctgaggaaggcccctgacgcataccgcgggggtcccgggcgtatgcggcacgcgtttgtttctcttgccgtgcg

SEQ ID NO: 460827 - DNA, 422 bp, Sorghum bicolor
cgtccggtccttcaaggcatatcttatcgcttcccatgattcaacatcccatatgtcatcaacaacgatgaagtacctataattcacacaagaatgcagagctatgaatagtttggcaaatcagtatagagtatccaaatagaccagacgcaagtaacattttttttcgagaacatgtgctgcatgtatttcattaagcataagtaacatgaacatggttctagcaagaaaaatttgcagcctatgactccatgggagaggattatgtgtctatcaattcaaatgtgctacaacttaaggatccaactaaaaaaaaattgaaattccaaatatttttctagatgtttggcaagaaaattcgttgtactttttaaccaaaactggaatatctcataaacgatttaatcgaatgaactgaatgc

SEQ ID NO: 460828 - DNA, 373 bp, Sorghum bicolor
  unsure (1)..(373): unsure at all n locations
cgtccgatttcatccactccctctgcaatgcgacatgtcccgtgcccgtgtgcgtcagggaatgcttcaacctcctggcgccctacgccgtgtccatcaacggcagcaacaccagggccgtccgcagcggagtcaccgtcgtggttgccgagctccaggccttggccaagagtgccatcgacttcaacaaaaccaatggccaggactacgagctgggtccgtgcatccaggtgatccaggaggccgccaaagggggcgaggctgagctccagctcaatgccgncgacgatcagcatttttccaaatggtaccaggacgccaagaacaagatccaaaaatgcgactatgacatcgccgatgtgcccaggagcca

SEQ ID NO: 460829 - DNA, 382 bp, Sorghum bicolor
cgtccgcccacgcgtccggttgagtccactgcagtgaaggatgtggtttctgatggggatgaggctgagtcaacagggattgttattagaagccgtcaccctgctccaagttcaagcctagagagttcattcactcaacagggaactgctatgcgaaggctgcggctacagtcaggcctcaacaaaggcctgtgtcctagtagtgatgattcatcaagctgcatcatagacgaatcagaaagtcagcacaaaacagagaaagcagagattgaagaggatgcaagtacaaacctcactggaagtgttgatgatctacctggcaatagctatgatgatgagcaaaagaacatctctgaacatggtgctgaaacggcttgttcag

SEQ ID NO: 460830 - DNA, 274 bp, Sorghum bicolor
gtccgagggtatggaaggggtgagttcagttatcgatctgattatggaggccgaggtggtggcaggggtggctcatcacgtggtgatgtcagctaccagcgggttgaccactctggtacagccagtggtcgtggtgcccgggcaccatcggctgccactgctgttgcaaagtgagttcttggtagctatgagttggtaatagttgagttttatggccaccatcatggttgaccaaaagagtggtgggtttggaggattcgggttcatgtgagga

SEQ ID NO: 460831 - DNA, 184 bp, Sorghum bicolor
cgtccggtactacatggctccctttgcgacgatgatcctgtcagtgccagccatggtgctggagggcagcggcgtggtgagctggctgtacacgtacgagtccgtggggccagcgctgtctatcatcttcacgttgggggtgctggccttctgccttaactttttcatttattacgttattcac

SEQ ID NO: 460832 - DNA, 357 bp, Sorghum bicolor
cgtccggaaacttgtttacaaagagctgaatttggatgctgctaagaagtttctgagcgcatatgagagctgatgatgaacaatagatagatgctgctcaaggatcagcaggtgccaatgatcatggagaattgttgatgcttttgagattttgatcattggcaaacttaggccattgaaatgtgttgtgtgcagacagtagatatccctttttggttagctacaatatatatattttttcagataaacgtttgaagttgtccatttgtacactaatatacgtttttctgtgtttgcacttgtattcgttgtatcttttttaaattttagtataaaagggaacctactactcttaaa

SEQ ID NO: 460833 - DNA, 223 bp, Sorghum bicolor
cgtccgcgcagacgaacactaagctcccctggccctattaaaatggcccaagcatatgcagtccaaattaggcatatggtcatgaagactggatagaatgaatttcaggacactggacgagtcatcatttagcgaataactatcttcatacacaatgtctatctagattgatttgacttactgatgttgcatggtcagttttattgttttttgagagctatta

SEQ ID NO: 460834 - DNA, 297 bp, Sorghum bicolor
cgtccggtatgaactaccaggacgtggcgtgacacaatgagactactagctgcaacactgatatcatgcatgcataacaagtgtacagattggacgcccaggcatgtttcatagtggccgatgttgaacatatttacaatgaacgatgcaagtccggaacggacatgtattgaacactgagcgtcggatgtgtagctgaaacggactgcattgctctccatccagggagtgaggacggcagactgtgatatcttgtatgagattattaggacacccatgactgtacgtagtaggcaa

SEQ ID NO: 460835 - DNA, 465 bp, Sorghum bicolor
cgtccgccaaaatgcttcaaggtttaatatattttagcaaggttgtagtcatgatgtcattaccgctcttttatgatattttcattctcatttggaatcattcattggcatatgttatgatgagtactcagttttctataatgtttgttttccacttttattgagacgagacatgaaatgcttttttccatgatttcaaattaccatgtgtggccttacttcatactttaagccctgttgccaaatatatgctgacctatgctcaagttgcctgtgtttgttgcttcacaacgctaaggaatatgctaagttgtagatttgcaatgaggaaaaatccattttatgtaacattgttgacagttatgtccatgttttttattgcaggttaattaaggttgtttggatagttctgcaattgtagttaggcatggattctatgagaagtcagggtagatctactgaatc

SEQ ID NO: 460836 - DNA, 472 bp, Sorghum bicolor
cgtccggcccagtttcatgctacctacttctggaacagagacaatgatgaggttcattggatgacagatggtacacattataggattgatttcattaccttctgcaggatattgggttttggaaatgaccatagaacctactctcgaattcacaatgagagaaggtttgaaccacaagaggtgagttttatgtgggaggatccaacccaagtgaacaacaggaggactgggttgaagagtttctattatgtgatgaacaaccttatcaaaatgacactcaacccaaaagacaatgccactgatctaaatggacatattactaatgtgctgtccagatttccagaaggggataaatttaatatcccaaggttcatatgggtagagctggcatatgctatggatgatggaaggaggtcacttccttatgctccttatctgatgttgtgattgagagagtgactggagtcaaata

SEQ ID NO: 460837 - DNA, 88 bp, Sorghum bicolor
tccgaaaaaaaaaaaataaaaaaaaaatctataaaaaaaaaaatataaaaaatacaataaattttttttaaacacataaaaaaataaa

SEQ ID NO: 460838 - DNA, 388 bp, Sorghum bicolor
cgtccggaaacgggacactagtgctatgcctcttaatgtgtcatcggctggaagcgtgaatgatagcttgaagcaatcatatactgttggcactccagagctacaatcaactgcaacgtcacgtgtcaagtggcaaagggctgaggtaaaccatgctctgatggaggagattcaggagataaaccagcagcttatagatacagagctccatgtctctgaggatgatgccgagtccttcactgcatctgaggggggtgaagggacagtcattagatgcacattcactgctgttgctgttagccccagcttgaaatccatgtttgcttcagcgcaaatgagtccgattttgcccgtgaggctgcttgttcctgctagctacccaaaatgc

SEQ ID NO: 460839 - DNA, 56 bp, Sorghum bicolor
cgcgtccggaaaaggacgcaaaaaaaaaaactaacaaaaaacaaaacaactaacac

SEQ ID NO: 460840 - DNA, 342 bp, Sorghum bicolor
ttcccggtcgaccacgcgtccggaaaaaagaaaaaaataaaaaattaaaacccataccctcttaatataagaaaataaacatacaactacataaaaaaaaaaaacatatattaggggtatgggtaatcaaaaaaacagagtaggaggtggcgctccgatctttatgttccttgttttctcccccttttatcgtacctttttccttttttttggtcaccccaaaatttatttctttgcccgtaatttaacaattcattaccttgggactctcttaacataccccaattttgaatctttcctgcacatccccttttatccattgtgtaaattatccaataggcc

SEQ ID NO: 460841 - DNA, 402 bp, Sorghum bicolor
cgtccgttgacgtagaccgagagctagctctctagcggatgcactcgaggatacacgtgcatgcgcagcttgtatgtcatgtattgggtcacctatagtgaggccactgtccaattgactggaccgtgtttactagcaaaacgactgcgaaacccaagtcaatacccaagtaacacatcttgctttacatagctggcgtgatagctggcaggccagcaccgagggccctaccgaacagtcgtgcaaactgtagggcaaacgggacgggcaatggaacgcgccatgaagcgcggcattaagcgcggttgctctcatggtgaccctcacactggccagtgcactagctagcgctctatcggccgcttttcttgcctttttcgctacgtttgtcggctctaccgg

SEQ ID NO: 460842 - DNA, 398 bp, Sorghum bicolor
cgtgcgacggcttccaacacgcgcagacattttctttctggtgagccactgctgctcctggcatgacgaaggacggagatgtgtcccgcgaggaggaccgaggagctgttgagggcattgaggaggacgaccgaggcattgcaggcttccatggcgaatagggttttctgcagcagcaggtcgcaagattcgaccattcaacagcttacatcagatactacaatagaggttgcaatcgatataccttttccatttcgagcaataccagttgaagccattgaatcaagtggcaggcaagtgcttgaacagttactcagagtcatgcttccaagatttctaaagcagcttgttaaagactaccaagcttgggcttctggtgatgcttctaggaaaccact

SEQ ID NO: 460843 - DNA, 461 bp, Sorghum bicolor
  unsure (1)..(461): unsure at all n locations
cgtccgccatacacttctctcagcaattaggtgctgatgacctggacaagagcgcagtggagaggctgacagctctgagggctagggttgtggcaatggcgacgcaggaatcgtcggcggctctgaagccaaggcgaaaggctgcagcgcggcatggagggtctagcactgctaatctcctccaggctctggaagagtacttgccagctctgctagaactggtggaagaaggcagtgagatgagaaacaaggtggagtttgtatgggctaaccaggaagatgtggctgaggagacatccatggcagatccttggtatgaggtgctgtccgtgctgcatttgatggccatggtgtgcttcttgcaggctaacaccctgctacttcctaggccctatgtggatggtcacggtcccagagtgtcagtagagagcangcatgccactgtagtctcttcttgaagg

SEQ ID NO: 460844 - DNA, 315 bp, Sorghum bicolor
cgtccgacctgctatcgtccaccgaaaatgcttctgagctttcagccgcacctttcgttgtgtgtcaggctgttgagatctgcattattgagtgtctttgtgaagtacatatagtttttgcgagcatgattgcatgagggaaggagtacacccaactaagcatttgcctttcatatgccctgctttagtgatccagatgctgcttcttcaagtgatttgtcgatatagtatgcgagcaatgtattggttttggctacagctgtcctgtcatgacattagctatgtatctatctatatctgcatacagtattggct

SEQ ID NO: 460845 - DNA, 274 bp, Sorghum bicolor
cgtccgcgccctttttttatttttttttcttctcttttttttttttttttttcacctcagggtgagacccattaacattattgaagatgatgaggagggcgactaatgcaattggcctggttgcattcatcggcgtggccaaacctgtcacttacccgacgacgactacagaagctgcggcggtgtctcctgcggcggcggagttcctccaaggccggtgcaaccctagcgagctaccaaaggagaccccccggctcttttacaactccctcct

SEQ ID NO: 460846 - DNA, 393 bp, Sorghum bicolor
cgtccgcactcatcaggctgcaggtggagaacggcaaggtggtcaagcacgaggattggtgggacaagaagcctctgaagaacagggacacggtgggcctgccgctggtgggccgtctcgcggaggctagccggcggggcgccatgctgctcacccacgccctcatgggcttcggaaacgaccctaaaccttctccacactagtaccagtgtccattttgccgccacgtcaatccaatccatcagtcagcagtactccagtgtagtgtgtatttcggctgtgcctttagctattgatcaatccaacggattacacgtatacattatttactgtattctcatcttgcctatactattaattaacatgatgtgggggataaacccctgcctatat

SEQ ID NO: 460847 - DNA, 402 bp, Sorghum bicolor
  unsure (1)..(402): unsure at all n locations
cgtccgaataaggcgcgcgccatggcgaaaactacnatcctcctcctcctcctcctcctccttagtagtatccttgttgtcgcggatcaagctggtacaacggcaacacaattgtctcctgccgctaaaaagtccattggcgacctcaatttagaggttgagaaggttatcgatgttgtcgactctgctgccccacctgcgaagcagatggaaacaatgcatgccggtttgaagcatctccaacccatcaaatctgctctcgccaaggccaaggagtcaggagatgagaagaaaatcgccaaactcgtctttagggtggagatagccgctgccatcatcaatgctgcgccggcagacaagaagctaatgatgatggaggactccttcaactcggtaggtgca

SEQ ID NO: 460848 - DNA, 313 bp, Sorghum bicolor
  unsure (1)..(313): unsure at all n locations
tttttcttttttttttttttttttttttcttaattncactgtaataattgtgaaattaacaatgaacatttgtataggtccacgtcctgtggacctaacttgcccaacaatttgcctaaaaaccgcaaacttttggatagatcaacagtgaggtcctcatatggccaccattttacaaagggaaaagttgccaaacaacaatgggataggcttcaacaaaattgccaggaagtcctgcacttgattaggcacacccttttgttgggtgctgaagcagttttttgtcattctggagtttcactgatttgtgatt

SEQ ID NO: 460849 - DNA, 404 bp, Sorghum bicolor
cgtccgcggtcatcggcgggcggcgcaccgagggcgcgagctcgagcgccgcccggtccgtgcggctggtgcggaagctcgccacggccttgtccgagggccggagcgagcgcgtctccacgggcatctggaccgcgggcgacgacccggagacgttggaggaagttctcgccttctccctgcagaagctggagaccatggccgtggacgcgctggcggtccatgccgagatggccgacgaggacgcgccgttcgaagtgtcagcgtctgcgggggacacgacgagcgtgttcgactcgctggtgccgtctgacgagtggtccgagtctgctgcaagcggtggcttcgactggcgcgtcacgctggtagcggccatccatgtgcgcgacctggggcggcggtac

SEQ ID NO: 460850 - DNA, 522 bp, Sorghum bicolor
cgtccgttttttttggaagaaaatgaagatggttaacatatagtcagagaaagaaaaaaacagtgcgaaaagaatctgtatctatttacgtttttatttcctaaacacaaactaccaaactctacttaaaatacaagtgtatgtatcgttgtgtcccatatctgtacaattgtccattactagccccgaaggcccaagccgtttcgtcgctaccagtacagtcagttccctttgtcagccgctccattacattctgatgaagcctcttccacgagccgaatttgtacaccttaccaaattttctcctcttcgtataatcaaaatttcaacaaaaatcagctcaacaaatgaatcaacacagcctcaaattcagattgacaaaataactgtgtgaaacctgtgttagctgatgtcacttgcaggccttgaacccaactgctggggcagctttttaaaaagctcaacttctcttgctatttgaatatcagatggcctaaaggtctgatatactactttacaaag

SEQ ID NO: 460851 - DNA, 396 bp, Sorghum bicolor
  unsure (1)..(396): unsure at all n locations
cgtnccggctactacatccggcgaccaaacaagtctatgatgagctcacatcttaccatacgcatgcaatgctgacgtcattactttacatatagtgggcatgtagaagcacaatgcactgactgtgccgatacaatgaaaatactcggaaagcgttgcccaaactgacaataatctattgaggatgcagcccggtcgcagcagaatgcgtgagctcaagaaggacgaaacggatcgcacaaacgagcaggtgctcacacagaaagatgagtgggacgcgcactgtagcggctcatgaagctcgttacctgttgatgacaaccactgaagatctactacattggtcagggagatatgtcaatatgtttttgctgcttaagagcgctgtgttggcat

SEQ ID NO: 460852 - DNA, 498 bp, Sorghum bicolor
cgtccgcttgcatacagtgatggcatcagaccagtcgagccagcaagaatggcagtagcagctggcctatcagatgggttgttatttacagagcttgacagacctgatggacagccatgtgtggaggctcaagagtttggattggtgaggaacatgctcattgcagccgtcgaagagagatacaaggatgctgcatcatggaaggacaaacttatgcggctgaggtctaagcggaagaactgggcctgacagtgttgcatgtctggatggtgtaaataaagatgatgccaagctgaattccagtatgcattccagataattgatactggttatggctctatgtaactagctgtacatattgtatggacctaagaatggtcttctgtaaattcagactaagctttgaagtgaaacactaatccttggaaaatttggtatcttagccgtgttcatttgtatgtcaagctgttactttgaagtgaaacactaatccttttg

SEQ ID NO: 460853 - DNA, 579 bp, Sorghum bicolor
  unsure (1)..(579): unsure at all n locations
cgtccgggaggatgacatattctctgaagatgatattccatcagaacaatcatcttttgattctgtagatgatggagcagattcagaatatttatcagaagaaaattctgaagatagcaatgatgaagtgccatgtaaagagtcatttgctgagccaaccgagatggaagcaatgaaagtgttatcatcaaaagaatgttttggagcgatggaagcagtgaaagcatcaaaagaatgttttggagaacttcgtgtcccatatacaaatggacgcactttgccacaaccaacttccaattgtcatgtaaaaacttctgctgtgaccgggacaggattgcaagagttgttggcattgatagataggaaactgactgaacaacaaactgttgtgcaaagaagcgatggacctttcgacaganaatggagacctagctctatggatggtgaaaatgctgcagagcagnagaatttttgcatcagaaagattgagaaacacaggaagggactgtattgaatttgaacaatgtgagtcactttaacagaccttctggactcatgcttcatgtgctaggaagcatc

SEQ ID NO: 460854 - DNA, 155 bp, Sorghum bicolor
cgtccgcaacatgtgttgtgtctgccctgatcctgggtcggttctgttgtattttaagtagttttggtttgtctaccgaagacattatgcaaacgtgttgggagagccaatagatgggattgaatcgagtttctgctttgttctgattctttata

SEQ ID NO: 460855 - DNA, 246 bp, Sorghum bicolor
cgtccggtaaaattcttgatgtcttggatcccaaaaaaaattattgatgtcttgatacaaaaaatacttagcaaaagtactggactaggtatcagcccagggagccaattaaagagcaagcctggcgtcctagtacattgtcgagaaaactgctgaaatgaaaagagagggctgacctttctatgggacccaggttaaccaccctggacagccgacggaaaaattcttttaacgggcccccaaaat

SEQ ID NO: 460856 - DNA, 371 bp, Sorghum bicolor
cgtgcgaaaaaaaaaaaaaaaaatataaataaataaataaaaaaaaaaataaattaatatataaaaaaaataaaaaataaaaaaaaaaaaaaggaaaaaagaaaaaaaaaataaaatggagggttgtgtcatatttaaggaattatataattctaattcataaaagtatattaatatataaatgaaattataaaatataaataataaacaaatgatatatttgtaaaaaataaatagaataggaaaaaaaaatatttataaaaaattacaataatgaaaatatataataatataatatattgattgaatagttaaattatattaaagtaatatataacaataaatatattatataaataaatatgttatat

SEQ ID NO: 460857 - DNA, 175 bp, Sorghum bicolor
cgtccggcaaattactgtatactgtgcactttcttgtttttataatggctaggttcaacttttaggtgtgaactaaaaaaaaaataagggtagttgtttcttattttaaaaatatgagatagggataaactaaaaagtgaataataaataatatgataatatgttcttactttat

SEQ ID NO: 460858 - DNA, 115 bp, Sorghum bicolor
  unsure (1)..(115): unsure at all n locations
cgtccgagacatcacggtggtagcggtggtggaggaggatctgcttnctgaattcaccatggccgacgaggcactctgggagggggaggttgtcaccaaggagtagcaccactca

SEQ ID NO: 460859 - DNA, 295 bp, Sorghum bicolor
  unsure (1)..(295): unsure at all n locations
gataggtcgccgcggtcatcgtcctgcggatctgctagctngactctcgcctggatggctggatctcctgtcggtcgccccgtggcggtaggacggggtcacacctgacctccaggcgcccaactgcgggttgcatcgccttgatttttggcaatatcattggtggtgcctcagcacaagtcgggctaggtggaggttatactactggtcggagatagccttgtgactaagttatattttttgctcatacgaatgagaggaggagctcaaaaccttcgatgctgagttcgtcaag

SEQ ID NO: 460860 - DNA, 343 bp, Sorghum bicolor
  unsure (1)..(343): unsure at all n locations
catctgactgacttgtctacatggctctcaataatatctggaacaatgcaataccatngctggaaggtcgcaaccaatgctgttgatggttctgtgcccttttctgagcagacgatatctcaggcgctagccacagctagggagcaccttgcaagatctctactgaaatgaacaaccagcaatactttataacgtattatatgacctatatgtgtgttaaaggttgggctactgaatgttgagggtctgtgtagtcgttattcatcgtaaaagtgctgccttgacaagagcctagttgtaccgagagttggcgcatgcaatgctcttgtgatttttttgatcc

SEQ ID NO: 460861 - DNA, 423 bp, Sorghum bicolor
  unsure (1)..(423): unsure at all n locations
cgtccgcccacgcgtccgctnnttttttttttntaatataagactttattgtttaccatttcatttcagaaaatatcaaaacgtgggttcacatacatgatataagaggcgtccacatatgacagccactgaaaatgcggtccaagcaaacaaactcgagttgagacgcgcacgcacacacacccatntncgatcaagataatattatgaccggaggtagtcattttctggactcctccaaaaattcgaggatccaagtacgcaaaaacaaagaaatcaataggtgaggtaaattcatcagtgccgcaacaaacaaaatctccaggcaacaactctgcaaacatgatcatgtccatggctgcaacttattaacctcagacagcacttcagatatgaccatatcaagttgttactgacgctgac

SEQ ID NO: 460862 - DNA, 176 bp, Sorghum bicolor
  unsure (1)..(176): unsure at all n locations
cacgcacgcacacacacccaacgccgancaaaacaagcagaagaccggaggaagccaaacggaggacccccgcaaaaaaacgaggacccaagaacgcaaaaacaaagaaaccaagaggcgagggaaaaacagcagagccggaacaaacaaaaacgccaggcaacaacgcngcaaac

SEQ ID NO: 460863 - DNA, 142 bp, Sorghum bicolor
  unsure (1)..(142): unsure at all n locations
gtccgntatcccggtcgaccacgcgtccggtttccctagaaggttagagtaatgtgatttcctttccggcatcgatgaactcagctgaagatgtagtgtgtagtgtggtggttcgttaatctatggatcagttatctatatc

SEQ ID NO: 460864 - DNA, 218 bp, Sorghum bicolor
ccaagaagcaggatgagccagggagaggaatcagctcactcaaacggtcatcgtcttatgatgaggacagagtttatagagcagcacattccaaaagtgatacagaaagctcttgtgagtcgggtagtttcaggtgtcttccacagactatcagaatcatatcatgtaagcagtcgaggaatggaacaatactctcccctgtctctgatgtgagaaac

SEQ ID NO: 460865 - DNA, 469 bp, Sorghum bicolor
cgtccgcttcctactcgcggcggtggcattgacggcattgtttgccattggctcatgcggcactacgctcaccatcgaggtgcggaaggactccacctccaccaaactatccctcatcaccaacgtcgccatctccgaggtgtcggtcaagcccaagggagccacggatttcacggacgacctcaaggagtcagaacccaagacttttacccttgacagcaaggagccgatcgagggacctatcgccttccgctttcttgcaaagggtggtggctaccgtgttgtcgataatgcgatccctgctgacttcaaggccggctcagtttacaagaccaccgaacaagtctaagcaatggacacatgtgatcttctgcggcattgagattatattgaccttaaataaattttctagagagaccaacgggacacaatgagcatttccaaaattcattttctatgggtattttgg

SEQ ID NO: 460866 - DNA, 513 bp, Sorghum bicolor
  unsure (1)..(513): unsure at all n locations
cgtccgagaagagagcgcagcttctgtcgcgagccagtgtcatgaacgaggcactggaactgtacagggaggttagtgccggccaaggcactgaaggtttcctctagatgctcgtaattgctcctctgcttgtttcaaacgcctcacanagctgcactagtgacgacctgtgcattgngcgttctcagtggttcagattcctggaagattagactgtactcttgctcctcgtaatttccagtcgttgtgaggccgaacgggccctcgtcgttccccaagcagaagcgtagctgcttttcatttgtgattaggagaaataaataaagcagtccatattgttaataattggtagttgacagccgcttctgtttccagtgtggttttggtccgttcatgctgatggggcgatggctgaaccgggaaatgattggttttcagcaaaggatcatcacacatcgttctcttggtttctggaaaaaaaaaaaaaatgctttaagctcaacatttggctat

SEQ ID NO: 460867 - DNA, 551 bp, Sorghum bicolor
  unsure (1)..(551): unsure at all n locations
cgtccgcagnatcagcagcatgtnnnaaatcagctgcttcaagaagttaagaacactaacggccgcacattgccacagcaaccacggccagatacccctaatgcaaacagtggtatcacatcaggaggtgctaacaccaacagtgctgctaccggagagcaggcacagcgcatcaatagcagcgccgaaaagggtgcagctacggtcggtaccgggcctagtaatgtgatcaacaacagcacagccagcattgtccccagcagaagtaacagtttcaagtcagtaagcagcaatccagctgctgctgccgccgcctccgctgctggaggcaatgccgcgacttcgaaggctgagcccttccacgaatttgatgacttcgagcaactcctcactaatgaattggtgggaaacgagttcttatgggacaattgacagagtacaaagacaccgtactgctcagacttcagtgtaagcgttgagaaacagccttcttggctgctagtatggaaactagcgtgtggcgatggaaagttgcccaggattctaggttc

SEQ ID NO: 460868 - DNA, 470 bp, Sorghum bicolor
  unsure (1)..(470): unsure at all n locations
cgtccgcccacgcgtncgggcgagtgcaagctagacacgatcaagcgcaagtgtttctgcaagaagccatgctagttcatcggtgtctgtgctaattagtgatcgatgtgtgctccactcanttttgtggccttatatctctccaaaacaatatacgactnntggtaatcccgatcatcaaaactgattntgcagttctttttttatttagcgttatgtactggttttggggctccgattgcaagaagctatacaaattttttgcctattgtaaaatggacatttatattattatgatttggtaatgatgtcgaactctattttgtgatgtttcttttaaattttttgtgggtgagttattgtagtagctatggctaccttctttggaatggtgggctcctttctttgatgagattaaagccaaaggatattccatataaaaaaaaaaaaaaaagggcgggcggttttaa

SEQ ID NO: 460869 - DNA, 292 bp, Sorghum bicolor
  unsure (1)..(292): unsure at all n locations
cgtccgcccacgcgntccgaaatttcctcatcggcttcgcttcctccatatcgaatccncatcgctctgctccatccatggcaactctcaccatgcagccgatcggtcccacccccgccccggctgcgcaggaagaccagaggaacggngagaatcttcctaccgtggatgctaccgatttgagtgacatcgactcgggttgggttatcctcaagaactcggatattgtttccgcggatttggcagtcgccgccaagcaacaggtcgtcagcagcagcagcacagcagcagc

SEQ ID NO: 460870 - DNA, 60 bp, Sorghum bicolor
  unsure (1)..(60): unsure at all n locations
cgtccgaaataaggaatcatattagggacatattacatgccaaanaataaaataaaatat

SEQ ID NO: 460871 - DNA, 110 bp, Sorghum bicolor
gacggccggcgccacgagcaccacaaccaccagaagcagcggcgcggccaccggcggtcggcatccgcgtccgcgcccgcgttcacggggcgagggctaagggtctggcg

SEQ ID NO: 460872 - DNA, 95 bp, Sorghum bicolor
  unsure (1)..(95): unsure at all n locations
tcgacctacgcgtccgaaataataataatggcataggacctgtncannntntnntgantcattctcattgtcctatgctgtaacatatggaaggg

SEQ ID NO: 460873 - DNA, 330 bp, Sorghum bicolor
gatccggtcgacacgcgtcaaaaaaaaaaaaaaataaggcggcgttaagacagctacacctcatgcgaggatactttatggataacaacatgcggtacaccgacgaaccgcgacactaagctgaaatcccttgagtgggaatacaaaggcccgaccgacgccttcaaagtgcacctgaaggaaggacccctgacggcataaccgggtgggggacccagggacgtcatgaggctaccccgtctcgttttctcctttgactcgcggtttccgaagttaatgggctccttaggccgataggcttacggacctgaccaaaactgaaggggaggt

SEQ ID NO: 460874 - DNA, 526 bp, Sorghum bicolor
  unsure (1)..(526): unsure at all n locations
atcccggtcgaccacgcgtccgtgcttgttctattatgatgaaaagtaatgcttacataacttatgttttgctccttatgcagctcggcattggaactgtgccagtgcttctgcataagctcggcatnggaactgtcccagtgcttctgcataagttgcttcaataactgtgatgagctcactgcaattggtcatcacggttgccactataggatgactagcgagcggttgaagtggagaaggcancacaggcagcacatactccattgatctcttgtgtgattttggtattgggtggatcttggctcgagaaatatgagtcaatttgatgggatgagctgcaatttgttaggctcgagaaatatcaattgattcatgagcttcagctgaattttcgcggagaacgctttttcngcnaggtttatccagcaaccacgcaaggtgacctgagaaagttgcatatggagtagtagataaggccagatactgcacttcttttcctgtttggaattaccaagcacctatt

SEQ ID NO: 460875 - DNA, 171 bp, Sorghum bicolor
agcggcgttagaatccactctccgtgcatgcacttacttttgggacgtaatcaatactgccgcgttacactctgactgaaacctgcgtccactaatcgctgccacatccttcgcagctgcgtaatacaaaggccgaccgatcgccttcctcagtgcgcagctgatggcatg

SEQ ID NO: 460876 - DNA, 327 bp, Sorghum bicolor
ccctgctacgtttctaacatatctcatactgaggagaggaatattaactcgttgtagatccatatcaaatttacttctctatcctatactgatccatacatatactccttgtcaagataccactattaacaaggaccaaaattctcgtagagaagcaactgccaccctacgctagaaaataaccaatcgactaatgaactaacgaactacctgcttctttttccttgattgctaaaagaatcataaaagcatgtttgataaatggaccattatgggccagtaatatattttatgatataaatcgatttcatcattgaacagttctgt

SEQ ID NO: 460877 - DNA, 241 bp, Sorghum bicolor
cgtccgattcccggtcgcccacgcgtctctactcggagttactgatattacgccagtacctgtagttgaatgaaagctattactagggtgagactagagaatagaacttactatggacagagagctactcgtaaggagtcacttacgacagatgtacagtgtggtgaaaagatgtccggtggtatgaataaggtggatcatggctgggctggtgctgtatggctggggagtgagtgaaaag

SEQ ID NO: 460878 - DNA, 113 bp, Sorghum bicolor
  unsure (1)..(113): unsure at all n locations
cgtccgcggacgcgtgagcgggtgcaatttggtcattattcagttgttgtgaggctctacagataatactgacaaanaagaaaggccananaaaaaaaaaaaganaaannagg

SEQ ID NO: 460879 - DNA, 260 bp, Sorghum bicolor
gctctagagatccagcttacgacgcggcagcgacgtatagcttggataggcaccaatcaatcactgccgcgttacacgcggacggaacccgcgaccaactaacgctgacaatcccttcgcagcgggaaagcgaaaggccgaccgacgccttcaacagtgcgcagcgaaggcaaggacgcccctgagcggcctaagccggcggtgggggtaccgcagggccgtcactgcaggcctacgccgtcttcgttcttcctccttct

SEQ ID NO: 460880 - DNA, 309 bp, Sorghum bicolor
  unsure (1)..(309): unsure at all n locations
cgtccgctctgtcgttctcttccagttattggtagtctntttcgatctgaaaaacatacaggaggagatcaggagagcgagaggtacctagcatgatgagcggcaaggttctccttgtcgccgtcctcttggtgggcgtagccgcctctcggtgctcaagcagtaggggcctgcagggcggcgatcacgttgctgaacagaagtacggtggcggtgggtacggaggaggtggcagcggcggcggctatggtggcggcggtggcggtggacgctctcgcggttcttgaagtgtggtcggtgtggtggttt

SEQ ID NO: 460881 - DNA, 56 bp, Sorghum bicolor
  unsure (1)..(56): unsure at all n locations
cgtccgaaatataannaaannataataataattataaataatataatattaataat

SEQ ID NO: 460882 - DNA, 200 bp, Sorghum bicolor
aatagctaacaatcgtgcatggtgaatgggacacgcgacgcaccgtgtcatgaagcattaagcgcgtggggtgtactcgcaacgcgcacggtgcactttgcagtggcctacgccctagtgcttgctctttttgctttttctctttcgttacgtgcgacggctgtccgctttacgcgctaagctgtaaactggctgctggg

SEQ ID NO: 460883 - DNA, 159 bp, Sorghum bicolor
  unsure (1)..(159): unsure at all n locations
ttctcaaccagttggcgctagcccttgatatggcgatatggggaccgctgctccnntgtagctggctgctattatagctgcctggcggngttggtggtgnngttactgcngctagcngtggacttcgctactatcttgcctagcgcttctaagcgctct

SEQ ID NO: 460884 - DNA, 63 bp, Sorghum bicolor
cgtccgcttcgagctcgctcttcgtcccgcttcccccggagccggagccgttgaagcgcacat

SEQ ID NO: 460885 - DNA, 93 bp, Sorghum bicolor
  unsure (1)..(93): unsure at all n locations
tcgacccacgcgtacgagcgacacctgngccctcgnctccgggctctncagcagcctcgggatggccttcaggttcgccgagatcgagtacgt

SEQ ID NO: 460886 - DNA, 92 bp, Sorghum bicolor
  unsure (1)..(92): unsure at all n locations
cgacccacgcgtccgcagagggagcgctgngactgngagtagcgagtgagcggngaccatttcatcaagaacagagcagcagaagaagctaa

SEQ ID NO: 460887 - DNA, 295 bp, Sorghum bicolor
cgtcgcgcgcccagacacacacgttattatgtctcgcgcgctcgcccttgcggtcctcctcgtcatggccgccgccatcgcggtggcgccggtggccgcctacgcggacgccgtcgtcgtgcagtccatccccggcgccggagccgtcggcggcgtcggccccgatcgcgacccgaccagcggtctgctggccgacccatcgcccgacgcgcgccgctaacgccacgcgcaccaggcgttgttccggccggcctgtatgaacattgcaagtacggtcatgttgttatgtctgttg

SEQ ID NO: 460888 - DNA, 142 bp, Sorghum bicolor
  unsure (1)..(142): unsure at all n locations
cgtccgcccacgcgtccggcgggagcactncgacctgnccatgccggcgnncctccagaacgcggaggagaaggccggcatcgngcccggctcctaccggccggtggcgtgcgcgaggcanggcggcatccggtacgccatc

SEQ ID NO: 460889 - DNA, 365 bp, Sorghum bicolor
  unsure (1)..(365): unsure at all n locations
cgtccgggccggccggcgaatcaatcaagaacgtcaccgctagttaggggcgtggttgttggacctgcgtgccatgggggatcaccatatgcggctgcacaggccggcgccgatcgagaagatcgcggtgccggagaagaaggccttgttcctncacgccgccggcgcgtcgtcgccggtgcagcagcagcagcagcacggcgcctcctcgcacgagagcatcacgccgcggacggccacgaataagcagccggcgagcccccgggcgtgcctctgctcgccgaccctgcacgcgggttcgttccgctgcaggctccaccgcggcaatttcgcggcggcggcggcggcggcggcagcgcgacggc

SEQ ID NO: 460890 - DNA, 551 bp, Sorghum bicolor
cgtccgctccaagaaattctcatattttattccccaaaatatggtatttgtcaactcttaaattagtatgagcaggaaaaaaagaagtcatctccaagagtttgctatatttttatcttaaaatttttttctcagcatttttttcctacgacccggtcttatattttatattaggaactctcaatttatttctatacgtgtgtaagccctttcactaaatctttctctcttgtgtttttctcacatggaaccctgtctttctccttactagatgggccggaaaactcaagatacgcgctcctaggccacgtgcatatatgcgcgctgagagaaatttttgctgaggttggaaagatggggaaggaagatggcaaactattggagagagtttttttttattttgccaaaaaattaatgatggaaaggccggatggcaaactgttagagatgctcttatgtagtaagtttttgtaggagagtaccctacaaccaatttcagcatatatgcgagcactgctgcagcaaattaccttaaatttgcttctatattt

SEQ ID NO: 460891 - DNA, 360 bp, Sorghum bicolor
cgtccgaagcggcatagccctgcgccgcgtccggcagcatgtggatcaggcccgcgcccaggaagataccggcggccagcgcgtggcccgtcgcggcgatcggcgacccgtgcaacgggcggctcgtgcggaaccagggtatcgccgcgaccaccgccacgacgaccaatgtcccggtcagcaggatcaggagaagctcccggttcacgctgtcacgcctcccatcgcctgcgcatcatggatcgatggcgatgtgatgatgtatcattggggatcggtcaacatggcctgtgtccgaccgccgcccccctcataacgaatacgtcacgcagggtatcgtttttgccgtcagtcatctat

SEQ ID NO: 460892 - DNA, 248 bp, Sorghum bicolor
cgtccgaacaagcatactcaatattttgagtggggcgtccagacgttcatgagccacaatgcgcccccagcatacgaatgtctttctactgtgggtgctcttgtggagccagcacttgcggatcctgctagtggagagagtcctgaaacacatgtctatcctcgagcaaaattattcaaaagcataatctattgtgcgcctgaaaatacaaaatgcgcgggcgcagtaccttgatgaggacatcgcat

SEQ ID NO: 460893 - DNA, 299 bp, Sorghum bicolor
cgtccgtctctctctagagagtagacccaggaaagagggaagaggcgatggatatggccatcgacacgccatcgccggcgccggcacccacgccgccggcgccttcggcggcggcggggcggcagacgcgtgcggcggaggcggtgcgtctggagcaccagctggtgcgcgtgcctctcgagtccctccgcgccaccgtccgctcgaaccaccgcctcgccgagaaggagatcgccgacgtcctctcctccgcctacgcgggccccggcgagagcagggccgccgccgtcgaccacctc

SEQ ID NO: 460894 - DNA, 308 bp, Sorghum bicolor
cgtccgaaaataaataaaaaataaaacaccactaaaaaaaaaaaaaacaaaaaaatattaccaataaacacaccatcaacaaacaccgggggcgactctttataaaaacatcctgccttaccaacccatccataccatttaatattttttatattttccaaactaaatttaattgcctctcccttttttaacaacccgactactataaaaaaccttttccctacctaacttaattgccatgaaataaaacctttttttagctcccttaattaaaaaaaaaaagccccccactcttcttccttaccaaa

SEQ ID NO: 460895 - DNA, 448 bp, Sorghum bicolor
  unsure (1)..(448): unsure at all n locations
gtcgaccacgcgtccgctgtatatgagagtgttaggttggtgatatggcgtactttcgtcttatttgacaattactgtcctatcatggactaattaggcgtgaaagatttatctcgtaaaaaaaaaaaaaaaaaaaaaaaaaaaaaaaaaaaaaaaaaaaaaaaaaaaaaaaaaaaaagagggnaggaaataaagggttaagaaagaaaaaaataaaatgaaaaaaataagataaatataaataaaaaaaaaattaaaattaataaaaaaaatttaattggggggggctttttaaaaaaaaaaaaaaaattttaaatgtttttaatannaaaaatttttttaaatggtacaaaaaaaaaatttattggcttgtgtaaaaaaaaaaaggaaggaaaaaaaattttttttataaaaaataaaaaaattttaaaaaaaaaaacctatttcc

SEQ ID NO: 460896 - DNA, 195 bp, Sorghum bicolor
cccgtccgatcccggtcacccacctcccccacctccgaaaaaaaaaataaaaaaaaaactaactactattcaacaaaaaaaacatacaagggggggttttttaaattatgtctcccctacaacctctcctgaaaaactcttctccccacctttcacccctgcattcctctttcccgcttcataataaccggtttc

SEQ ID NO: 460897 - DNA, 174 bp, Sorghum bicolor
gtggtatgtttacatctgtaagcgttgagggctatcatagtattaccagttctcagcagtgtcttaccatgatatgcctgataagggtgggacgtctctgttatcaaaaaaaggatggacagctctgagtgggagaacattccttgtccatcgagtgtgaaggctattgttgca

SEQ ID NO: 460898 - DNA, 101 bp, Sorghum bicolor
cgtccgggaatatatattccgacaggaaagttacaaggaggcctcttgcctacgtgactctgctggacattatttgctctatccagctacatctgtgtgca

SEQ ID NO: 460899 - DNA, 343 bp, Sorghum bicolor
cgtccgggcctcggtgctcgcctccagcagctgcaaggtctccgacgcggcggcggggctgccgcctgcatgtgccgaggtcgcctgcggcaacggtgctcgcggctgcgccgtgggcagcgtgaacgatgagccgcatcagcagcagcagcgccacgacgattaccaccacgagatcgtgcctgagaagatcatacgcgaggactcgccgccgactgcgccggtcgattctgaatggaaggagaccggcgtcgtcgcaaccactgaagacgaggaggtggagacccccaagaaaggagcggcgcctgcaccagaaccggtgccggagccggcgacgtcgacg

SEQ ID NO: 460900 - DNA, 220 bp, Sorghum bicolor
cgtccggtggggttattgacgtgaccctgaaggccatcactgatgactcgctggtggatgagtctctggccatccttgccctgctggcaggtgaccacgagacagtagaggagatcggcgagaccggcggcgtggcctccatgctccatgttataaaagaagaccagtgcaagcgcaacaaggagaatgcagttgcggtgctcttcgcaatctgtatgta

SEQ ID NO: 460901 - DNA, 474 bp, Sorghum bicolor
cgtccgtgttttcagtcacagaagctattgaaaaaatgcctcttgaactctttcttcaagttgtgggatctccaaaggtggacatcactataactaagtgttctgggagaacactttcagagattcctatcagccaatacaatttactcatggacgctcatgccaagggccgtctctcacgcttaataaatattttagataagctcaagttgattgaacttgtaaacgaacatgtagaggattctgatgtgcgtccaagggctgtcactacatattcactggagatcaggccttacattgaagaacctacaccaagagttattccatcatcaatgtcagtgttaaccatcatccaaaattcggcatgattttgtgctttcaaagctggagtctgtcgatgcttactgggaaacgttaaagtactgctatctaacagcaggattggctgatcaaaatgcctttcctggccactgt

SEQ ID NO: 460902 - DNA, 437 bp, Sorghum bicolor
cgtccgcccacgcgtccgtccggctccaggccgacgagataggatagccgatatatcgaggaggcgacgacgaccgaattgaagctgctacgcgcgtgctccaccaccacgaactaggaaatggcggcgccggcggcgaggcgggtggtcctggaggtgctcaggtcggcctcccgcgacgccttccaggtggccttctccttcgcggcgaggccgcccgtgtccaccatgctcaagccggtcgtcaccaagcccctccaccaccacgacaacaactaactgatcgatccacggcggcaagcatgcccgcagcgccgcgcacgcgtcggatgctttatttcaccgcccggccctgcagcacagggtgcgcggcgacgacgacatgccgtgtgctgttgcgagttgtgacataggctctcggtaaggtccctaccttc

SEQ ID NO: 460903 - DNA, 144 bp, Sorghum bicolor
cgtccgaaaaaaaaaaaaaaataaaaaaaaaaaaagaacagaaaaaaaaaaaaaaaagaacaaaaaaaacaggccggcaacaaaaagggagcgaaacaaggggcggccgccctaagggaccaaagctatcttactcgggcttgc

SEQ ID NO: 460904 - DNA, 158 bp, Sorghum bicolor
cgtccgaacaatcacaaaggggaccattttggttacgctgcaggtgataggatgcatcatgtagcatgtggtgtttgttcattccattggaatcgtaacccagtaaagtttgaacgaatgaggaatgactcaatgttcattctgacttttatcggata

SEQ ID NO: 460905 - DNA, 114 bp, Sorghum bicolor
acccacgcgtgcggtgtgcacgcatgcacggtgaatataggtgatctaaggaataaagtatcagtcagatgagagcgtgactgtgagagaaagacagcttaacaaagaactaat

SEQ ID NO: 460906 - DNA, 107 bp, Sorghum bicolor
  unsure (1)..(107): unsure at all n locations
actccacgcgtccgtccacncgtgctgtctatatantggagaccaataaagtatgaggagtaggtggttgtccttaataaggatgtcgtggggggtggctacaataa

SEQ ID NO: 460907 - DNA, 203 bp, Sorghum bicolor
  unsure (1)..(203): unsure at all n locations
cgtccgccgcccttttttttttttttttttttttttttttttttttttttttttatttttttttttttttttgaccagtttgcgggaggctactttttcatagaccgaaaatttgcaggaattttggtagcattcccgntcactgcaaatatgctttttgccattgatcccaaaattnctatacaaaacagggacattttttt

SEQ ID NO: 460908 - DNA, 294 bp, Sorghum bicolor
cgtccgtctgggtctgcccgcccgcctccttgctcagttttgctccgctacgttttcttcaccacgtcctccacccgacggccgccgatcgaccacgccgacgaatagcaggatatggcagtggcagacgcgaacggaccggaggaaacgaggcatgaggacggaatggcccgaaaaaggcccatggtacagacgggcctgatctaggctagtctaaattatttctctcgattatcatcgcggccatctgattttttttcactgaagactaaaacaaaaccgtttggttttgca

SEQ ID NO: 460909 - DNA, 111 bp, Sorghum bicolor
  unsure (1)..(111): unsure at all n locations
gaatcccggtcgacccaccgtcggtaatctataatagtanattatgctaaaaaaaaattataaaaaaattataatttgnnnnaaaaaaaaaaaaagggcggggggtctaaa

SEQ ID NO: 460910 - DNA, 166 bp, Sorghum bicolor
cggattcccggtcgaccacgcgtccgtccggttccactacgccgtcctgcagtgggtgctgctgctcgcctccctggcgccgcggcaccgggcctccgtcgtcttcctgatggcggcgtccaagggcctgctcgtctacggtggcctactcagtgcattccccaac

SEQ ID NO: 460911 - DNA, 178 bp, Sorghum bicolor
cgtccggcttggggccccccctcccgttcggcgcattcgcgttccgcacccgcaaggaggccggagcagcagccatgggcgtggaggaggcggggcgcgccgccaccggcaagaagctggcgctggcgagcatcggcttcacggacgtccgcgttggcgccgacgtgcccgggggtgc

SEQ ID NO: 460912 - DNA, 289 bp, Sorghum bicolor
cgtccggtgcctcagctcgtgacctcctcgaccccggcctgcagcctggccctggctccccggcccacacgacacgcccaccacaaggatctccgttctccggtgccgacgatctcccggcctcctccacagcactactatctagcaatcagccagcggctgcagcagcaatggcggacgacaacacggtgacgctggtccgcctcatcctcgccatcatcctcccaccgatcggcgtcttcctcaagcacggcctaaaagtgtgatggtcgatctgctcgtatcctgt

SEQ ID NO: 460913 - DNA, 422 bp, Sorghum bicolor
cgtccggttggcagatgctgtggcccacctcatccatgcattctccactttcatcaacaaattttaaaaagtcataactcctaaactaaatatctaaattaaaatccgattacaccatcgcatttcttataataaatccttcaaaacaagatctcacatggatgtatttagataaaattttattaataaacatttatcttataaagataaaacatttttatttatgagagacgatgttctaggttcagaaaacaaatgttccatattcataagaaaaatgttctcagcttaaaaaatagtgttctagtttagattcataaaactgatattataatatttaaaataaataaattaatacatcatgtaaacaaaaaaatctaaagcaaagcataagaaaaaaacccgttattgagaaaatttta

SEQ ID NO: 460914 - DNA, 409 bp, Sorghum bicolor
cgtccggcttcatggctcttaaaactgtgctgctactcccatatgaagctctgagactgcagtgcctgcagatggtggaggcgaaaatgagggaaggaatcgtgtccacctcatcaaatgctgatgatcatgagctccttgccttggttctttcctctgaaactatgcagaagatcaccatagaagagggcgtactccaaattttctcttacatatgccatcttgtcgggcaccttgcaaggtcattccagactgctctcctcgtacaatggaacgatgaagcaacatctaagatcaacagatctttactgttcggtagaagtttgtttccatgttttggatctgaactggtcctcagagggcagtatctctggctgggttcgcatctcgagatggtgcacacacatca

SEQ ID NO: 460915 - DNA, 85 bp, Sorghum bicolor
  unsure (1)..(85): unsure at all n locations
cgtccgataaatccatancctacgccggactaatagataatcaaagctaatgtactcacgcntaccacgctctaaacctacgggg

SEQ ID NO: 460916 - DNA, 169 bp, Sorghum bicolor
cgtccgcgcaaattaaagatgaagcagcatcagttgttattagtcgtcgtcgtcgttgccggcagctgcttgtggttgcaatcgacgacggcggccggcgagcccagtccgctggtggccaacctgcctagctcccccgtgagcgggacttatcactccgctgcgagac

SEQ ID NO: 460917 - DNA, 70 bp, Sorghum bicolor
cgtccggctggattctgaacaagctagccttgaacagcggcgcctttcggttcttgacttcctaaacaac

SEQ ID NO: 460918 - DNA, 196 bp, Sorghum bicolor
  unsure (1)..(196): unsure at all n locations
cgtccggaagctgattccctgagtgatcgacagatggcaccgcttacggagatgacatttctttgacctcccattctttntaatatatcatagtcatatgatagaggatcaccttcttttcttcttcttcaattctccctatctactggatngacttggtcagacactaatgtctgtgaatataacttatcgatca

SEQ ID NO: 460919 - DNA, 74 bp, Sorghum bicolor
cgtccgttcaaccagaggtaggaagagatcgaaagcatcagccatgtcaaactcggcgtctggaatggcctttt

SEQ ID NO: 460920 - DNA, 395 bp, Sorghum bicolor
  unsure (1)..(395): unsure at all n locations
cgtccgcagaccttttgatcgattgacctgccagtttctttgtgatttcaaacgacgataagaacccggccgggccggcgctagggttgcttggcgagcgagcgagcggcgttgacaggtttcttcccgcgctcctgcactgcatgcaatgcaagtcccttttcgccacgaccacgattggatcggccgatcgatcaggcacaggcggacagggactagaaggagacgaactcgctgccgcaaggcctgaatgaatgaattttctatgcccccatactatggagagtttgtctcgtgtttttacactgctaccatctttttcgcaaccaaaaatacagggcaaattttaancggtggttcggcaccaattcttttcgtgctattactcaacggtt

SEQ ID NO: 460921 - DNA, 117 bp, Sorghum bicolor
  unsure (1)..(117): unsure at all n locations
gaattccggtcgacccacgctccgatcatagaagttcatcgcattgctgntcctgctgaagagaacgtgattgatccttcaataatccgagataaagctgacactggagagaaatca

SEQ ID NO: 460922 - DNA, 260 bp, Sorghum bicolor
cgtccgcgcgtgcaacaatcatttttgatgggtatatatatggacgaaactatatatacccctattaatttggtatttttctaagctaattgtttttgtatgttcaaaatatatcgccaatcgatattgatccatcgatgatatatagttttatggactgctctgtagcaggccaatgtaatgtcacgcaaataagcatttgtatttttgtttgattgattgaatgaatgaatgaaaaggcatgctggcagttgttatca

SEQ ID NO: 460923 - DNA, 148 bp, Sorghum bicolor
tcgcgtccggactaggtgtagatcggggaggtacggtctatgagatacatgctatcctacacgatcatgccacgtcatagctgtaacatagtgacggcgaaattcaagtcactggccggcggcctagagagggttcacttcaaaaact

SEQ ID NO: 460924 - DNA, 144 bp, Sorghum bicolor
ccgcattcccgcgacgactccgaccggcgatcacacatataggtgtcaaaaaagaaacacataatggtagtattatcagcatctggccattatggtatgaagtcattacagaggacatgcatcccaaccaacatggcctatact

SEQ ID NO: 460925 - DNA, 116 bp, Sorghum bicolor
cgtccggtgcagaccatatcaagttactgtgaagagatatttgcttggacaagtcctcttcagacttcaagggagattcgcaagatggaggggaagagcaggctgcctgaggtgac

SEQ ID NO: 460926 - DNA, 125 bp, Sorghum bicolor
  unsure (1)..(125): unsure at all n locations
cgtccgcaacggcgaggctacatcagtatatatgtatatatatatagcgatcaaccatgcattagagagatcatgcatccttatacatatgtaaatgctggcctgntgtccatgtaatttggttt

SEQ ID NO: 460927 - DNA, 312 bp, Sorghum bicolor
cgtccgatcccgtcgacccacgcgtcgcttttttttttttttttttttttttttttttttttttttttttttttttttgagaattggaaccaagaggggttttgcccttgggaagaaatgttaaataaaactatggtcacacagttccccacccaaaacacaaatggaaaaaaaaaaaaacggggcacacattactccaaataatgtcattccccggttctgtggacacgtttttcggacaacaatccgcggcaaatattttacacgtgttaggtgattttagggggcgtaagcctttgcctgtgttttatt

SEQ ID NO: 460928 - DNA, 266 bp, Sorghum bicolor
  unsure (1)..(266): unsure at all n locations
cgacctacacgtacgcgtccagatacgagacaagttggtggaagttgccctcagcactttggcctgctacgcttgagtggtctgtatacagcctttggaaaagttttcttggagttttgggaggtggtgctaanggtgaggctaaagcttcaagtgaagtgaaagtggaattagctatcctgaagatggaagtggctcttgagaagatgcacagagagactgaaaagatgaagtattatgcttacaagatgagatctgaagcttac

SEQ ID NO: 460929 - DNA, 83 bp, Sorghum bicolor
cgtccgaaaaaagacaagtagatagaaagaggtcctaatcactttggactgttatgcttgagtggtctgtatacagtgggggg

SEQ ID NO: 460930 - DNA, 125 bp, Sorghum bicolor
cgtccgagataattctatcaagaaacaagtaacgagatataagatgcatcagcacctcaaatttcatcagggtgagatatcgaagaccagtgaatacaatcctctagatctatttgctgggtcaa

SEQ ID NO: 460931 - DNA, 225 bp, Sorghum bicolor
cgtccgtagtacttgtaagaagccagtcaaagccagccaatatgcagttcatacagagcatatgtagctcagggaaggtaagcacagatgattcatgggtgtgattatgctcgtcctacaaagcccctgaagagggcagaaaaaaaagttgataagtaatggaaatcacaaagtgcacataagagtgaaagcaaaatgttaacctgaaagcaagaacgttgccaa

SEQ ID NO: 460932 - DNA, 62 bp, Sorghum bicolor
tgagaattgcttaactttatgggcaacaatgggaagaaaaacaaatagggaaagagaaaaat

SEQ ID NO: 460933 - DNA, 82 bp, Sorghum bicolor
cgtccgcccacgcgtccggcagatcaaaggaaacaagagggagatcatacagctcggtgtcccgttatttcaacctaccaca

SEQ ID NO: 460934 - DNA, 365 bp, Sorghum bicolor
  unsure (1)..(365): unsure at all n locations
cgtccgaaaaaaaaaaaaaaaaaaaaaaaaaaaaaaaaaaaaaaaaaatncataaataaaaattaaaaaaaaaatattttttaaagggcggccgcgccttttttttttttttttttttttttttttttcaaggcttttttttcttcaaaaaaaaaataaacacttttttttttattttcgaaatcttttttttttccgatattttttaacctttcttttacttttaaaattttttttttatggtggttataattaaaaggggatttgtaactttttaaaatttccaactccgatgtatttgttttcgtatttattatacaaaaaactattttaccttttcaaaataacttttttttatttttttt

SEQ ID NO: 460935 - DNA, 347 bp, Sorghum bicolor
cgtccgcccacgcgtccgtacatattgaagttccgcgagctggcgaagaccgtgccgcttgcaattgaccagccacagtagctggtgctcgccttggtgctcgtagcttgctcaactgttactgtgtaccacttggtacaaaactgaaccttatcgcagggaaggaccttcagtaatttaggtgcggcagacagcagctaataaaatgtgcatatgcgctcgtttgtcttgcgctcaactgaaccttgtgcctccctggctatactggctcaacatctaggtttatgtacataaggcatgctatgtgatccacctttagcgtcaggctacagttttctggactttgt

SEQ ID NO: 460936 - DNA, 139 bp, Sorghum bicolor
ccgtccggatcccggtcgacccacgcgtccgaccagaactacccgctcctgaaccagatgcaggtgttccaccacatcggaggcagccaccaccaccagcagcagcaggcggagccggcgttccaccaggacaacggca

SEQ ID NO: 460937 - DNA, 410 bp, Sorghum bicolor
  unsure (1)..(410): unsure at all n locations
cgtccgtggtgagacagtaatagacgaaaggaaaataagaataaagcccttgcctgctggggcagaaaatagcaaaacaccaattgctacacttgcagatatccctcttcctgattcgagattgacacgtagaaggaattctttcaagttggactcatatttggatcctgcttttatgtctataattaaggatcctgatctccgacgcaaggagcaatgngaaaaatctgctcaggcaaacaagggacttaacttggctaacatgcttgggtttggtgatcttggcagtccaccattatctgctgctgaagaatattcacttcattcacgataccttgctaaagcgaattctatgaatctgtcagatgttgctgaaatgaaaataaattacccgtggaggagttgatagt

SEQ ID NO: 460938 - DNA, 216 bp, Sorghum bicolor
cgtccgcccacgcgtccgaaaaaaaaaaaaaaaaaaaaaaaaaaaaaaaaaaaaaaaaaaaaaaaaaaataaataaattatagagggggtttttttttatttggagtggctcttatttatataacatcttttttttggttaacctttgtgtttttcatattttatttcacttttaaaacattacttctttacaagactttgttattttcataatta

SEQ ID NO: 460939 - DNA, 355 bp, Sorghum bicolor
cgtccgcaaccgagtccgaggttgccgttccagctgcagccggcgccggcgacgaacctcacgtcgccgcagccggcggcagcagcgccgttcagctcggagttcctgctgatgatgcaggagatgatccggatcgaggtccggaactacatgtccgggtcgggcttcgacccgcgcgccgacggcgcctccgtgcacgccgtgaccaagcgcatgatgggcatggccaagatcgagtagtttcagcagacagcagcagcaggcgtccaagatcaggaaggaatcgccgatcgatccgtggcggccaccgcgtgtatgaaccaagaacagcgtgtacaaaccaaacagaagccgt

SEQ ID NO: 460940 - DNA, 113 bp, Sorghum bicolor
cgtccgccatttttctgctgccccaactgggcagctcgattgtggttggcacagttgtaattgtaaagatcatcaatttactgatatgataagaaggtgcactttcacagggc

SEQ ID NO: 460941 - DNA, 250 bp, Sorghum bicolor
cgtccggggacaagaaattccagttccagattcattccaaattgtgatattgttccatcgttcagcttttggttccatgaatgctctaattaggttgctaacttatatgatagtatgattcatgatttatgcagcttgatatgaacttggaacgcttgcagtcagctattgatgtcctacttattaggctttcccaaacttttacaactaccaagctgcagcacctttttcttttgaataattatgacat

SEQ ID NO: 460942 - DNA, 422 bp, Sorghum bicolor
ttttaggtaacaatgaaaatacattgcacgatgaagactataatatacttatttagtaataagaacattagtattctaatataagcttggttaaactttaaataattttgcttaggacaaaattagaacataaaaagaatgagacagaggccgtaataaaggtatacacgtcatcacttgcacctgtcacattctgcccctgcatcatcctcagcgttgcgccctgaaggacggcgtctgggcctctgctgcttgcatcgacacgacaacgacgacgacgagagcgcatgcggcggcgcctgatgcagtctagcgacgcgaagcatgtgccgcaacctggactgcgcatggttgtagatgctgagcctgtgcctgttgcaggatgcaaagaacaccaagataccattgagtatgcccctgat

SEQ ID NO: 460943 - DNA, 124 bp, Sorghum bicolor
acccgtccgcgccgcctcccgaactcgcgcaggtaccgccgacgaagcagcgggaggagcttgggccgcagcttgccggccgccggcgacagtaatccccccccccccccccttctgaaaactg

SEQ ID NO: 460944 - DNA, 420 bp, Sorghum bicolor
  unsure (1)..(420): unsure at all n locations
cgtccggtgtatcagatgttcttcatagggcatcaatctcagacactgctaaagacctgcagaacttttagagaagggtggcctaatgtctcagcacaacaattaactgcagcgttccaatagttaacgccagcaggtatcttggaccgacaaaatgtctacctcatcattttgtgatatgcacgggcactngcttcacatgaagaaaataaatgatatgtcctgtgcatgtcaaactctntgtattattagaataagtntgccgtgcgctnntgtagcttcattagtcagctaagaccacctaaatctttcaagaagcttatatgcttctatattagtagactgaacaacatgtttgtactgaactactgcaaaatactaaaataaccagtctgtatatcataactgtnnaaaanaaaa

SEQ ID NO: 460945 - DNA, 139 bp, Sorghum bicolor
gacgtacgcgccacgcgtacggatcgagaagctagcagctagcgagaagatggcggccaccctcaggctcaggatcctcgccgcggctgcgacgcgccgccgtcatggcactgccgtcgtcgacatcgcaccgcgtccg

SEQ ID NO: 460946 - DNA, 61 bp, Sorghum bicolor
tacgggcaccctcgacccccaaaaaaacttggtttaggggtgatggggtcaacgtagtggg

SEQ ID NO: 460947 - DNA, 372 bp, Sorghum bicolor
  unsure (1)..(372): unsure at all n locations
cgtccgaaaaaaaaaaaaaaaaataaaaaaataaaaaaataataaataaaaaaataattaataaaatataaaataaaaataaagggaggggatttattaaatatttataaaaatattttattaataaaatatatttttttttattattaaaatatttttaatttattaaaaattttttttaaaaaataattttttgaatattattatttttttttttttntttatttggtagatagaaaattgtgtttttaatgttatgttttatttaattgttttttaattattttggtttttgtatttttattttttttattgttttgtatttttggttattttttttatatatggtttttttttgattttttttttatt

SEQ ID NO: 460948 - DNA, 399 bp, Sorghum bicolor
acgcgtccgtattacagtgttctggatacatacctgtattcacagtgttctggaaagccacatcgagcctttccataacactgtgaatacaggtatgtattcggcgatgtgcattttgcagtgccctgtatactgtgggatacatctgacaacctcctgcagcagtatctgggaaatgatgcgggctgcataagatagcgttatgttgttcagttgggaatgatattcgatttcccactgtgactcgctcgggaagaggagtggcacggtagatgcaggatcaattggaggccggtgaaagacaggtctactctcactctgtccagctcatttgttcacttaaatattggaagtatcacatatgtacagcagtaacatcactgtcccatgactaatttt

SEQ ID NO: 460949 - DNA, 460 bp, Sorghum bicolor
cgtccgcggacgcgtggggccgggggcatggatggcgacggacggacggacggacggacacgggctacgccaagcagaacatccactgcggcgagagcgtgacgatcgaagggcaggcgtacacggtgtcggcggtgacgcaccggtaccagctgcgcaaggggcggtacgagccgagcgagaagcgcctcgacgtcctctccaccggcagatacatcctcaacctctacctccaaaacctgctcgaccagtcctagctaggcagctagtagtagtgccttagctactgcctgtctgtctgtatctgtgtacatcagcatcgcttcatcactctataattctaccacgctactgtatatatagctatctagctgtaaataacaatcaattggttcggctcctcctgctatgtccatcgaacacttgttccaagtgggtggtggcgatcatgggcgatcat

SEQ ID NO: 460950 - DNA, 180 bp, Sorghum bicolor
taccgtccggggatcccggtcgacccacgcgtccgaaaaaaaaaataaatataaaaaataacataaaaaaaaaaaaagtaacaaacaaaaaaaaaataaattatatagggcgggcgttctgtagggtcctagtgtatgcacgcgctttttcgtagtctttagctgtcctttgtttttccc

SEQ ID NO: 460951 - DNA, 313 bp, Sorghum bicolor
cgtccgggctgaagcggcggatcgaggaggtggtcgtggcgcagtccgcggtgcaccggtgcgcggcgtccgtggacttcggcgccggcgggagcccgctgcttcccccgacggtgaacgccgcctcgctgcacgcgcacttcgaggccgtcgccgccgagacggtcgaggcgggcgccgttcgcggtgccatggagccgtgcatggacagcgtggtcattacgttcttcttggatgtcgtccccctctttcacttatacttctttggtatcgggatcgaggtcatttgtgactttaactttgtaaatttatc

SEQ ID NO: 460952 - DNA, 462 bp, Sorghum bicolor
cgtccggtggtgtttctgaaacacttgtgcttaacatgtcaactctaacatggtcagttgttagcactgtggaaggacgtgttcctcttgccagtgagggcatgactttagtgcatagcaattacagtggttatgactatctcatctcttttggaggatacaatggacgatacagcaacgaggtttacactcttaaactcagtctgaaatcagattcgcagtcaaccgtaaatgaagaaactgtctcagatactacatctagggtcatagaacctgaggctgaaatttctcaagatgggaagatacgggagattgccatggacagtgccgattctgacctgaataacagaaatgatgaagcaagtgaacagcttatagcagatcttaaagctcagaaagaggaactagaagcaacacttagcagggaacagatgcaaactgtgcaacttaaagaagacatcg

SEQ ID NO: 460953 - DNA, 233 bp, Sorghum bicolor
cgtccggtcgcccaagtcgtgctgctcgacgtctaccatatctcccaaggcgttctttaattttaatttactatacattgatgatgattattattttttcattattaataatatatatttattatatattttattattatcatttttcttttttatttatatttattattttatttttatttttatttttattttttttattttattttttatgttttatttttttttttatt

SEQ ID NO: 460954 - DNA, 241 bp, Sorghum bicolor
cgtccggtagtagtagatcagcagccgctgtagtagatgcaccatgatgacctcctccatcctgcgacataattgttctatagtggcgcctactaacaacactctactcgccgtcttacaacaacgtgactgctgaaaccacgttgtcaccacccaacataatcgtgctgcacaacatacttcttccatcagctgtcatatcaaagaagaggccaccaatcatcgttcctaacagcagttg

SEQ ID NO: 460955 - DNA, 71 bp, Sorghum bicolor
cgtccgcccacgcgtccggcattcccgtgctcgttttgagaataaactttgcgttaggttcctctggaaaa

SEQ ID NO: 460956 - DNA, 77 bp, Sorghum bicolor
ccaaacactggcaaaacaaggggctgaccacaactaagctaacgggcaaaacatgactcacattgcaggtggcaacc

SEQ ID NO: 460957 - DNA, 328 bp, Sorghum bicolor
cgtccgttttacatcacaacagttttggtccgtgcagacagtgactgaaggaactccagcgaaggtataactcacaactgtgaagtgactaaacataagtggcagctcttcccgtatcggacgtttaaggttgagttgaattttctagagatcatttgtgtgtacaagtaaaaaaaatagcgtcgatgagaattataaactggcatatagaacttatggatatttattacttgtttgttattgttgaggtgtgtggcggcgtcatgtagaaattggggtattcctcccagcatacatgtaactttataaatgtactgttatgtaaaaa

SEQ ID NO: 460958 - DNA, 235 bp, Sorghum bicolor
cgtccggccctttattttttttttttttttttttttttttttttttatacatgtgagataattaattaacaatttaataggataggacttttgtatttgtacattttatacaataaaaaaaaattttttggataattaaaacatatgcccgttcaaattatgtgataaaaagatttacaagtgatttgaaaaaaataaaaaataataagttataagaaaaaataggaaattctat

SEQ ID NO: 460959 - DNA, 82 bp, Sorghum bicolor
cgatcccggtcgaccacgcgtcgggaccgtgggaaaaaaaaaaaaaataaaaaaaaaaaaaaaaaaaaaggtataattataa

SEQ ID NO: 460960 - DNA, 235 bp, Sorghum bicolor
cgtccgaagagggtctacttcgacggcgaggagtgcgcgctgccggataggatacccaaggtgtcgagcgcgcgccggcgggcagggacggcgagcctcgggcagcttgccatggcggcggcgctcgtgatgattgtggcgctagtggattaattccttgtgcctcctatgatgatgatgagtgaaaacgatcgtcgactgacttcatgggccggcggggtttatacatatggga

SEQ ID NO: 460961 - DNA, 370 bp, Sorghum bicolor
cgtccggccgctgctccccacctccctctccccgcggcaggcgctggagatgcaggtgacggccgccgccttcctcgcccgcccgctcccacggctccgccgcattgacggctagggtccggatgcgccggcggtgcgcggcggtgccgtagcgctcccgccgcggctgcgggggtcacggtgctccatcagcctctccatcggtgtcggcgctggcgttggaggtgaccgtgagttcatcatacgtactattagctggtattcgatccttgtaatgttcactgctcaatgtgattggtaaaatttgatgtgcgaatatgagttacactggatataataaaatgtatcctatgtaaatttacattttatg

SEQ ID NO: 460962 - DNA, 155 bp, Sorghum bicolor
ccgtccgatcccggtcgacccaccgtcgccaccgtcgcttttttttttttttttttttttttttttttttttttttttttttttttttttttttgtttgttttttttgggattggggcttttttttttttcaaaaaaaaaaagggtttaaatttt

SEQ ID NO: 460963 - DNA, 230 bp, Sorghum bicolor
cgtccgaacgagccaatggcgctctaagacacgaaacagctctttgaattgctggtggtgtacaagattgtcggtgtctacaacgacactgctggcagtgtggtgacaagacttattgatgccgagatactgattacatatgacactacggtgctgacgacagtggacaagttgacatagatgccctgctagttgatgaatgatgagttggcaaggtacaacattaactt

SEQ ID NO: 460964 - DNA, 128 bp, Sorghum bicolor
cgtccggtgatacatcgccttcggtcggtagagaggagccacggttgcacccactggcatgctacgagacttctctgctatgacgagagcttatttcagtgcactgtgcgacatttgacaagcgcaca

SEQ ID NO: 460965 - DNA, 406 bp, Sorghum bicolor
cgtccggagacagggactatcgtcgtcggagcagaagtagaagccgaagtccaagttcaagccctgaccgcaaaagtcatcgtagagcaagagatgatggcaagcgcaagagcaggagtaagagtagaagcaagagcaggagcaggagcaggagcaggagcaagagtatgagcagaagcaggagtagaagccgctcgtaccatagtgcttcacctgcccggcgtagtgctagccctcacaagagcccaccgccacggaggagccccactcctgaaaagcataccaatgggaaagattcacctctgtcacgcagtgtttctccatcaccaaagcgtgcaagctcccacagcccaggcagcgatggcaaggaatgaagcttgttgatctgttgatgcctaaagaacac

SEQ ID NO: 460966 - DNA, 145 bp, Sorghum bicolor
tgagttctcttattatatctcttactttggttagtttttaatgccctctttttaacgttttatctattaattattgtatattttgaattattttcattaagttatagttgttttatcatatttgtttctattttttttttttatt

SEQ ID NO: 460967 - DNA, 182 bp, Sorghum bicolor
cgtccgggcgtcgagaactgtctgtgtggccttcacaagtagtgtgagccttttgcaagggggttcattcgtgagtcgagttaaagtgttatgttgtactgtatccatgcgttctgtatgtgataataatgtgttccacagtgtagcttatttgttgccatgagaataaaattcttcatttt

SEQ ID NO: 460968 - DNA, 349 bp, Sorghum bicolor
cgtccgctgcgcggcgcggctggggtgatcggggagcttgggctgctccccgttgcgcaggcctgaacctcgagttgagaatccacactcccagagaaccgcaggaccgcccttccagtttgctgtcgcctgagcactagagtgcaagacgttctgctgcggtgtcttctgcctgtaccagtatctagttgtaatgttgctcccggtctcaaatggacatcgatggatgctctgtagaaatgtatatccataatatgctgttaccgaacctgcgtaggatgtaggcagagagtctcttgtactcccggatccggatcattatatattcatgtcatcgcgtgtggaacca

SEQ ID NO: 460969 - DNA, 173 bp, Sorghum bicolor
tctatagatccaagcttactacgcgtctagtaactaataattattatagtgggtgagtataatttaatgtgtatattaaactttaaataattattatttatttttttaaaatagtattattattgaattttttttttatatttattttttgtattaatttaaattaattttat

SEQ ID NO: 460970 - DNA, 502 bp, Sorghum bicolor
  unsure (1)..(502): unsure at all n locations
cgtccgctcgttcctaaagtgatttgtgagaagttgcaagcagatcatcggcaatgtcgaacgttgaggtagaggcgcggcaagcggctcagtgcggcaaggacgccgccggcgccaccgcatgcgcggctggcgctgccgcctgcgccgtgggcgacaccgccggagccgcggccgacaccgccggagtcccggccgacagcgcgcagctgcagctgcaccgcgccgccggcgccgttcagcaggctgccgagcaagtggcgcagacggtccagggcgcggcggcggctgtcaaggacaaggtgtccggcggccactgatcgacccacgcgtgaaccggcattgggcgtggcgtaccaacatttccttatgctgcatcgcaagggctgaggattaatataaggccaaagacggctaaattttacccatttccttatggtttccttattattaatttaacatgtntcaatcacccatcttattgggattggaacgcttcgat

SEQ ID NO: 460971 - DNA, 226 bp, Sorghum bicolor
  unsure (1)..(226): unsure at all n locations
acgcgtccggcatcttacatcctggatagatttgctttgtggacttgtggtatttggatacactgtaatggattggattaaattaatacatcgtggatgctggaacgaaaggagtaatgggattctggttgaaaatcatggtgttatggaataaatagagaatgccaatgatagcatnttagttgaatttgaaatattatgtgtgtaaactcaagcagacgtagta

SEQ ID NO: 460972 - DNA, 401 bp, Sorghum bicolor
tttttaaaaacatgccatattgttccatcttcagaaatgtttctttgttctattctagtagtttgtgagagcaggatagtcattcctctgcgtctaaacaaagaaacagaccccaaataaagtgggtaaggactgaactgggaaaaaaaatacaggaaaaagaatagcattacagcaccaacaggtatttcagtgacacatttccaaagaactacaaggccgcatagcttttttgtctgtaaggggagcaaccaagcagctagaagtaggccaccaaaaatttcctaagtctcatgcgccttcatcataaccttgctggtttccggtggtgggcgcggtgccttggccatcataaaccgtcaacggctcctttcttaatttctgagccacaattaaaggta

SEQ ID NO: 460973 - DNA, 207 bp, Sorghum bicolor
cgtccggtaaggatgaacggcgtgcgtgcgttctagaagaccctgaacggcgatgctgtgcctgctaccaagaccgtgtggtcttgagcaaacgatggtgaatcaaatggtcatccctttacaacattgcgactggtaacacgacaggcttaacactctaacttacgaacgagtatagcctgctctgagcaggtgaaagcttatata

SEQ ID NO: 460974 - DNA, 140 bp, Sorghum bicolor
gcttgagaatccctttgcgtgggaatacaaaggcgacgcgcttcacaggcacgaggaagacccctgacggctaacgcggttgtgccgagggcgtcatgcggcacgcgtcttgtttctctttgccgtgcgttccgagttat

SEQ ID NO: 460975 - DNA, 385 bp, Sorghum bicolor
cgtccgctgttctaacggtaaaacgcatggcctctaattgtttcaaataccttgtctacaaaaaaaaaaaaaaaaaaaaaaaaaaggggaaaaataaaaaagtaagatacaaaaaaaaaaacaattaaacataaaaaaagtaaaagctaatgtaaaaggaaatagataatggggcggcctttttaagggatccaactttctgtacgtgggattgcaaggttatagtttttttttgggttcacctaaatatatgtaagtgggcggtgtttataaaaatttggaattggaaaaaccgtggggtacccaaatttaatggtttgaggtaatgacttctttaatgacgtggtgtattatggaacagggcttattcgttaggttttttaaa

SEQ ID NO: 460976 - DNA, 237 bp, Sorghum bicolor
  unsure (1)..(237): unsure at all n locations
ggnagaggaaccaagcccacgcacgcgcgcacgcgacggcaaagcnanaccagggggacagcgaaacccaaagcacgggccgnagacggacaacgacgagaccgggaaagcccaggcgcnacccaacgcaaacgcaaggcagcacaggcacagnccgccagcaggcgaaagagcgaagaggcccggaccgancgcccgcgccaacaggagcgcaggcggaacggcgaaggggacgcg

SEQ ID NO: 460977 - DNA, 384 bp, Sorghum bicolor
acgcgtccggtgtatcgaccgacgaagacaagacgacggaggaggaaggaggggatgcgccgccaccggcggcggcagcggccagcgggcatgccgaggagtcgtcggagacagtagcaaaggacggcgatgctgctggaggcggtaaaacgccggcgccggcgggtgcagagtctcacggcggcaacctcagagtccccgtctcgtccgtccttacaattgctctgtcgtctctagctcttgttggcatctaacctctcttcttcgtttcgtcggccgtatcactgtgacgatatgtttagtatacgtagctgagcatgctgtaagtatatattgattgacgatggttagctgaagctattaattaaaattctaaagtatgca

SEQ ID NO: 460978 - DNA, 66 bp, Sorghum bicolor
acgaccacgcgttctaagagactataactaatccaactgttctatctagctaggtcaccaacaatg

SEQ ID NO: 460979 - DNA, 281 bp, Sorghum bicolor
  unsure (1)..(281): unsure at all n locations
tccgtccgaattcccggtcgaccacgcactccgcgttctaagcagctatcantaattttggtcttttatctacgcaacaaacataagggttgatcggtgcatcagatcgtcattcttcaatacctttctttatttaggggtcatacaaatattacccggctattgtaatgtaatcctcccatatgcgcggcaccttccgtggacgcangcaggcatacgggttagtgccgatgcccatgaggaggccngctgagaatttatgttctttcacgtttctacga

SEQ ID NO: 460980 - DNA, 176 bp, Sorghum bicolor
gtcgacccacgcgtccgcgtgtgtgtatatgtacctgtgtatgattgtgatatatgatgactgaaaaatgcgtacaaaaaaaaaaaaaaaaaaataagggggaggggggtcaattggggggggggaaacaaaataaagaacacgtaataaaaaagtataagggtggtattttttag

SEQ ID NO: 460981 - DNA, 124 bp, Sorghum bicolor
cgtccgctcaagcgtgctaggccattgctatctaccaaagcaaaaatacgagtccctccctcatcttatgtatcgtactttcttccctactcggacttcgctcaactatcttttacacgctcta

SEQ ID NO: 460982 - DNA, 85 bp, Sorghum bicolor
cgtccgatgacgcctacgctgccaacggatgaggtgataagcacttcactggtcttgtgcatatctacctcatgacaatcatatc

SEQ ID NO: 460983 - DNA, 102 bp, Sorghum bicolor
cgtccgcggacgcgtgggttctagtctgctcaaaagaaaaaaacaaaaaagacataaaagaaaaaaaaaaaaaagagacaaaaaaaaaaagggaaaggaaaa

SEQ ID NO: 460984 - DNA, 110 bp, Sorghum bicolor
cgtccggcctcctcgtctgggtgtgtgtgtgtggtggaatagcgtcgtcgtcttcgctggaatccgcctgcctgcttcgccttcgctcgcgcttgagccaaagctactga

SEQ ID NO: 460985 - DNA, 438 bp, Sorghum bicolor
cgtccgcgacgacctcgccgagctggatgcggataaccagtcgtcgtcgccgcaggcccgccgcgcccgcttcaaccactgcctcgagcagtacggcggcgccgccgacctcctccgcgacgcgctcgacaacctcaaggccaagatctacggcaaggccatggagcagctcaccgccgcgatgggcgcctccgagagctgcgaggacgcctggaagggcgaggaggaaatccccgtcgccgcgcacgacagggagtacggacggatggcgcacatcgccttcggattcacacacgcagccgccgcatgaatcatcatatcaatcatcatttttttcgcaaaaaaaatatatcaatcatcatctatatatgcatccatccatgaacgtaagaactccgtcctcttcttcttgcatcgtccatccaacatccatcatgc

SEQ ID NO: 460986 - DNA, 361 bp, Sorghum bicolor
cgtccgcggacgcgtgggcggacgcgtggggacaatttcaaagccgttaaggacccaaacactggttcttacagcattcaattccagaagtaacacgtgaagaaagacgatggatgaatatggctgggtggcatatttcagttgtaattgttcaaggcacttgtgcatcacatacccggaccatatccaaatagattggcatggaagaggaactggattattgcgttgcgtttgcacttgttgcacgttagactgttagatagattgagatgctttcccaagtgcgaacttgcatgatcattttgaactctggtattttcctcaatacaaagtcgtttcaaaaagactggttccatgcgtt

SEQ ID NO: 460987 - DNA, 173 bp, Sorghum bicolor
tgtagatcgtgagctaccgctcgcgatgaataacttcacgcgtcattagggggggggactatgacccgattactgatgactttaccttctttcatatctaagatccttaagatttcggactgatagtcttgactgaagagatatttattcgaagagttacatgtacttctatt

SEQ ID NO: 460988 - DNA, 68 bp, Sorghum bicolor
acccacgcgtccgaaaaaaaaaaaaaaaaaaaaaaaaaaaaaaaaaaaaaagaaagtctatgagaaca

SEQ ID NO: 460989 - DNA, 168 bp, Sorghum bicolor
ccacgcgtcctaaaaaaaaaactttatgataataattaaactaaaattaatattttctataataaaaaaaactataaaataaaatataagagacggagatatattatttctcctgtggtttctcttttttatattattttaaacttatttttcatgtcttaccctatt

SEQ ID NO: 460990 - DNA, 70 bp, Sorghum bicolor
acgcgtccgaaaaaaaaaaattaaataaaaaacactctgagcgtatttgacggtccatgactattaacac

SEQ ID NO: 460991 - DNA, 144 bp, Sorghum bicolor
caccacgacctcacgcgtacgcgtgcgcccatgtggatttaccactttgcccttcttcagtggggcctacacatccgccgccgcgtccggcgaaacaaccgggtgtaggtgcaaagtactacctcatggcggccatatcctcac

SEQ ID NO: 460992 - DNA, 382 bp, Sorghum bicolor
cgtccgctttttttttttttttgtttaaattatgggatgccccaggggaactgttgacgaataggtgatattctgtcatttacagagtcgcagacaagcattcttcccttctctcggatgcccgctttcttccttcccactatttccttttaccaccaccgagggacagaagctccaggctgcggtggagtggctcgtcgcgggagcctctcgcaactgcagcccgtgaaagggaggtagcccttgactcgccaggcgatggattaactctctgggtgctagatggacgactgccactgttgctagagaacaatctgcttgtccggttatactgctcacttggttccacagatgaggctggcctgctgcttgatgcaacagc

SEQ ID NO: 460993 - DNA, 293 bp, Sorghum bicolor
cgtccgcccacgcgtccgcagagactgggttagatgaagaccagtcctcaaccggtaagagtggggattcatcattttttgctggtttcttgagagaagggtttcaaggacctttctttattaaataagtccatggacagtgttaaggtttcaattaatggtcatccaatctctgaaagagcccttaagaggcagagaagaaagctgtcctgtgatccggttcatattgtacgataccggctgttttgggtgtatggacagagtgatcgcatgccctcattatagagattata

SEQ ID NO: 460994 - DNA, 394 bp, Sorghum bicolor
  unsure (1)..(394): unsure at all n locations
cgtccgcgctcttactcgcggtcacggcgccctctcctccctgtcactcccccgccccccgtccctcatcctccatccacgcctcgttttcctgggntgcaaataaagtaaacgccgcgggtgacaggtacccaccaccgaatccccccctgcgccctctttaacccgtcttctccacgcccgctctatcccctccgtcttcttcgccgccggccacctgaccgtgctatctcctctgcatccgagaatgaccctgcgccatgaggttctgagaagcttttctcaactggctccgcatccttttcttcaaacaagatattgaactttccttgataaggcttccaaaatccttggaatacatactttttaaccttttttctacttgaggctttaa

SEQ ID NO: 460995 - DNA, 109 bp, Sorghum bicolor
  unsure (1)..(109): unsure at all n locations
cgtccgnaaaagaaaaaaaaaaaaaaaaaaaaaaaaaaaaaaaaaaaaaaaaaaaaaaaagaaaaaaaaaaaaaaaaaaaaaaaaaaaaaaaaaagggagaagaaaagg

SEQ ID NO: 460996 - DNA, 444 bp, Sorghum bicolor
  unsure (1)..(444): unsure at all n locations
cgtccgatcttccacttcaatggaattgccaagtctgtgctgaatgggaatgcaagtgcaggtggctcatgccctatacagagacccaggttatgcaaactaaatgtcactgtccctccaaggtggactcaagatgagtatctggctgatgttgtaagcgcatcaaccagcagcagcagcaaggatgatagtattctttctctagctcccccagttcagactaatcagcatgcaccattggtggactgcattaggacacggtggccacgagctgtttgtagctgggctggagatgttccaagtattgtctgacacagtggatgttgtgtgcgccagtcactctagctatgttgctcataaccncattccaagaatctgctcagagcaagcactttgagcttcagatngtcatgcctgcaaaaggaatcgtaatacatggttttt

SEQ ID NO: 460997 - DNA, 315 bp, Sorghum bicolor
  unsure (1)..(315): unsure at all n locations
cgtccggcacttgaatcaccagagtttatgatctggactgcttttttctcagaccaaataatttcaggaggatgttagctcatcttacttaaagatttggccatggactctgttcctctgttaattactgcttactactggtgttatgggtgaacattaaactgactgtaagtcatgccttagagattgcttttttggccagaattagctacactggtagaatatttcttgtccaaactgactgctgctagcagatttgagtgcctcaagtagctgtttgatagatgtgcactcttgcttctttgctctgccnna

SEQ ID NO: 460998 - DNA, 395 bp, Sorghum bicolor
  unsure (1)..(395): unsure at all n locations
cgtnccgaaaaaaaaaatctaatataaccaaaactactatgtgcgactccatttggcgtgtccaagcttccatacactgtctttccacttcgtcgcggagccataaagtcacctaagttccagtcactgcccttcgatttacaacatattgactaggatggccctggcattacccaacctaatcttaactcagtacatcctcatctaacaagctgtccttatactgaatatactctaaacagtcatccttcaaatcatatgctcatcctttatgaacactgtgtcgctccctgtacaggcgcattaaacgcacctgttttcctattatgagcaatgttaccgatactcttgccacctccttactagccactaatttccctttctttactttcttt

SEQ ID NO: 460999 - DNA, 105 bp, Sorghum bicolor
cgtccgcccacgcgtccgaaaaaaaaaaaaaaaaaaaaaaaaaaaaaaaaaaaaaaaaaaaagataaaaaaatctaaaaaaaaataataaaataaaagggaaggg

SEQ ID NO: 461000 - DNA, 128 bp, Sorghum bicolor
acgcgtccggttttttttttctttcttttttcacactagttactcctttttgactaatgttttttgttctatttgaagcattccaacgagcgggggggttctaaggcagagagcccccattttttttt

SEQ ID NO: 461001 - DNA, 264 bp, Sorghum bicolor
ggggggggaaaagtccttgttgttcaaaatattccaaggcatttcccaacccatcccctttttttgaagggtgttccaaagcaactttcctacaccatgcatgcacttaatgccaccgtacaaaaaggatcgcttccttttacacgggcttcgggttgggttaccctactcagacacaacaaaaagggtttcaaatggaactagcagcattagctacatgcacattcaagcttttgtaccccataagggggcatgctcaccttt

SEQ ID NO: 461002 - DNA, 217 bp, Sorghum bicolor
cgtccggcacacggccatgaggggctagttcagtcactgtggcttgcactcggtgacggatagcatcatcatggctggttcgaatctagcgtccgcggtggcgcgcacatcataacatgaacgccaagttcgtcatcgatgtgcttggcgccggactcaaggtttgtccatccagatgaggtgacagcgaggagggccatagcgaccgcagttagga

SEQ ID NO: 461003 - DNA, 122 bp, Sorghum bicolor
tctagagggggcaagcttactaacggatgcatgctaacgtatacctgcttgtatagggtaaactaaattatagtactgctaaatgtaatacaacggccgactgttaaaacgttgggactggg

SEQ ID NO: 461004 - DNA, 130 bp, Sorghum bicolor
acgcgtccggcctcctccgtccttcagctcgtctcagtctgaccagctcgtcgccgcgcgcccgtatgggagggagtaagggaaccaccggcgcgactttacccgaggtcgtgtggactagcgccacact

SEQ ID NO: 461005 - DNA, 83 bp, Sorghum bicolor
  unsure (1)..(83): unsure at all n locations
cgtccgaaaaaaaaaaaaaaaaaaaaaatattataanttataaaatttaataatatataaaaaaatattataaataaaatatg

SEQ ID NO: 461006 - DNA, 356 bp, Sorghum bicolor
cgtccgcaacaagagagagcttgtgcaacagacacctgtagacgcttggaaatgcgcgagctcaggcgaggaagctcagaaagaatcacaaacttgcgggaatttcgggggcgaccaaggcaaagaagatcggcatgcaaagcgagcaaaaccagcaatgcagagccccctagcctcgactcccaaatccgtgaagaaattgagccggagaaattggggggaaacaaaaatgcagataatccaagtacaggagaccgcgccaatgtgcccccttaccaaaaacaaaaaacaaaaaaaaaattatagaaaagttgcagcaccaaatccgcggcaaaacaaggaatttgacgcgcgat

SEQ ID NO: 461007 - DNA, 64 bp, Sorghum bicolor
cgtccgcaacaggtactagtatactcctctgtcctagtatataaggcataactacttcgggttc

SEQ ID NO: 461008 - DNA, 78 bp, Sorghum bicolor
caggtacgccggccgtcgagcgcgcagtgtctcccaattccacccaattaaccgaaactaataacatctcctctacct

SEQ ID NO: 461009 - DNA, 100 bp, Sorghum bicolor
  unsure (1)..(100): unsure at all n locations
cgtccgaaatanaaaaaaaaaaaaaaaatctaaaaaataaaaaaaaaaaaaaaaaaaaaataaaaaaaaaaaaaaaaaaaaaaaaaaaaaagggaaaagg

SEQ ID NO: 461010 - DNA, 301 bp, Sorghum bicolor
cgtccgaacgagtataacccaagtgggaggtatgtagtgcccgagctctggaacttcaggaaaggtagaaaggcaacgatgaaggaggtgctcaggtgcctgttcagtcagatggacacgacgaccaagcgcaggaggggctgaggaggcgccccgaggccgagaagccaataagtagcgcctttacgctgctctgtcagtcgtgtgctgctcgatcttctagttagtggtagtctggcataataagtgttcgtaatcaaggcttaagtatgcatcatgttcatgctggtgccgggcaggc

SEQ ID NO: 461011 - DNA, 255 bp, Sorghum bicolor
  unsure (1)..(255): unsure at all n locations
ggcggcggagaagcctgcggcggtgcggcaagcggaggagctggtggagagggagatgggcggnctctacgccttccacgacgcctctcacgctctccgcgtccgggacctcgcgctctcgctcgcagccgaagagggcctctccgcccccagccgccttcttaccgtggaactggcctctctcctgcacgacgtttgagattacaagtataccaagaacaatgtggaggacatgagcgtcttggagacgttttt

SEQ ID NO: 461012 - DNA, 326 bp, Sorghum bicolor
cgtccgcggacgcgtgggctgaataagcttcttatggccctatttaggccctttgtgatctccagttctgatctggagcactttgggtggctttggtacccttaattatgttaggtcttatgcctgttcgtgctgggagttatctgatggggtcacttcacagagagcaggggtggcattcgttacttgaattgttgtattgccacggtgtgctgtgtcaggaaatgtcaaatttgttggtgcgtctgaagatgtggacaggttgtgaagagagcttgaaaatatggtttgggttcgttgataaaagttaagagtttttttttaag

SEQ ID NO: 461013 - DNA, 282 bp, Sorghum bicolor
cgtccgggcggtgatgggaaccaaggcggttttgctgagaagcagggatgtgactgtagaacaaggcctggagcatgtagccacatggaatgcgggtatgatgagatcgaatgatctgaaggaggccatcaaagccttcctggagaagcggaagcctgttttctccaagctgtaatgatcagattcagataccatgcctctacttaacagtgctacgtatctggaaatgaaaaggaaataagtgtgttacgagtagacaagaataccatctctgtcctctga

SEQ ID NO: 461014 - DNA, 264 bp, Sorghum bicolor
  unsure (1)..(264): unsure at all n locations
cgacccacgcgtccgaaaaaaaaaaaaaaaaaaaagtnntaaaaaaaaaaaaaaaaaaaaaaaataataataaaaataacaaactaaaatataaataagtggagggagtgtgtaaataataaaaataaaaaaatttaaaggggcggcctttttaaagaatcaaagtttacttacgcgtgcattgcaaattatantttttttttaggttcacttaaattaatttaattggccgttgttttacaacgttttaaatggaaaaacctt

SEQ ID NO: 461015 - DNA, 244 bp, Sorghum bicolor
tgctcacgtctacttttataggcacctaggtcaatcactggcgcgttacacttgactgaaaacctgcgtccactaatgctgaccatcccttcgcagtgggtatagcgagaggccgaccgtcgccttccacagtgccagctgatggcgatggacgcgcctggacggggcttagcccgcgggtgtggggttaccgcgcgtgaccgtcacttgcaggccctagccccgttctttgctttcttccttc

SEQ ID NO: 461016 - DNA, 330 bp, Sorghum bicolor
cgtccgcggacgcgtggggtgcttgggagcgtgagcgactactgcacgcaccacgcgcactgcaccgtcatgatcgtcaagaagccaaagcacaagcactgagatactatatatatgtgtcttggattggatgtcaagcggctcgatttcagatctgtgtatcttaactatttatattagttgcgcgtgtcagcatgagaataaaatgctagctacgtgtgtgcctagagtaatgacatatacttcatccagtctcaaatataggtaacatctagccagatttgtacgagacaaactattctaattttaacgagcaatgtttatcaaaaa

SEQ ID NO: 461017 - DNA, 319 bp, Sorghum bicolor
cgtccgcgacgccgccggctcggacgccgggccctccgtcgcgcgcgcgctcgacgagtccggatccgtcatcgtgctcggcaagaccgtcttcctcaggcccgatatggaaaagattcaaagaaagggttggcgctgttctaaaacgataataagagatgttgccacccaaagtttgggcaattttactccgctccaagatgggagtttttcttctctcaaaaaccagaaaaaataactggatttaacccctccccaaaccttagagggtacacctcatcatgattgaaaagaaaattgatcttactctatgatgaca

SEQ ID NO: 461018 - DNA, 349 bp, Sorghum bicolor
cgtccgtgctgcaattatgattgctcgcaagtttgcttcgaactgcaatatcgctctcgctggcccaggcgaccaaggcacctgatgaagtgatcatgcgtgttttgacagcgacacagtacataattagggtgtggattggctgattgggtgcttgtcttagtttgtctatttgtgcttgcgagggtagaggttgtacactgcgtgaggctatcccctttccatgtcttatggaggcattgtttttgtttgcctgcctgcagcattagtgacatacttgaaacatgatgtacaaattgatcactgttcttgtgccttacatttgtaatgtttgaaccataaaagattg

SEQ ID NO: 461019 - DNA, 190 bp, Sorghum bicolor
  unsure (1)..(190): unsure at all n locations
cgtccgcgtctctgtcttgctcacgacacgagcgcttgcggcggctgcggcagcgcaaggaggcgaccatggggcactccaacgtgtgtaactcgcgctccaggaactactttccccgtagtttgacaacgtcnatactgtgcaaacccttgcgttaccccacttaatcaccttctaatacattccactt

SEQ ID NO: 461020 - DNA, 311 bp, Sorghum bicolor
  unsure (1)..(311): unsure at all n locations
cgtcgcggcgaaaaggaggcggagtgagtttccggcggcgatttcgccggtcatctccctctccggcggccgtttaagtgtcanatagcgtgatggaccggtgaatcaccgtgcggctgtgcatagactaggtagtgtgttatctaggtctagggtttgctggggaggtgtcatcctcttgcggctttgtcttcctggcgtcnctggcgaggcgttggctgctgtggcgcaagggaataagttttcccggtcatgtccacgctcccttggcggtctctatagtcaagggtgggattggggatgtggggatc

SEQ ID NO: 461021 - DNA, 251 bp, Sorghum bicolor
gcgtccgaccgaccaccgttcccgcgtgttgcgttgattcccccgaatcgaaccaacgcgcggcgcggtgtcccggccatggcgcagctgccgccgaagatggccaccatggcgccggcgtggccggagttcggaggcaggcaccaccaccaccaccaccaccagcagcagcgcagcccctccgtgggcacgttcctcgccgcgcccatggccgcagccgcgctccaccaccacgccgcgcagcagcagca

SEQ ID NO: 461022 - DNA, 278 bp, Sorghum bicolor
cgtccgataaaatctaagttatagagttctatgggctatgtcatacgccatcaagtgaatcaagaggtatttagaattataggttatactgacaaaggtcttcctatattgtcatcattaattcgaggtatgaagaaaaattcttatgatttcgtttgtagtgttaattttaatttggcttgtgcaaatagtattttttgcagtgatcatgaacatttcacatttgtaacataatttttgttgctatgccgaatttttcacaggatgcattttctgag

SEQ ID NO: 461023 - DNA, 139 bp, Sorghum bicolor
gtcgtgaatttgagctagaaaaaaaatgtaatttacatttgatctttctgccctacagctacgacagcaggcacaagacgcagactgcttagtagttacaggcttacagttacagtcccatgaaacagtctgcgcccgg

SEQ ID NO: 461024 - DNA, 159 bp, Sorghum bicolor
cgtccggcggacgtgacactgaacatactcgtcgccgggcacgacgacgggcggttgcatgaacccattgaggacactggggccggcagtggcggacgagaactacaagcagctgacgatctacctgctgggcccgacgctgggcgcgttggcggacgc

SEQ ID NO: 461025 - DNA, 314 bp, Sorghum bicolor
cgtccggaaattgcttgtcagataactagttcctctccagtagatgacaaagctagcgaatcttctggatcaccagtgaaggatactcctgacgctggagtcagattgcaaggatcagataactcggctatggcattttctgcgctcccacttgttgatgaagcacctggaacaagcagcagagcagctggcatgcctgtggcatgtgattgcaatgacttgaaagaggatgttccactagacaacgctgaaagcaccgggaacctggaggagccgacggatgaactcactcttgtggacacggatgctgtcgt

SEQ ID NO: 461026 - DNA, 216 bp, Sorghum bicolor
gtcgaccacgcgtccgcagtaagcaagcagaagcagccaacggcagatatgctagcagcgtcgcaataatagtgctcgcgcctgcgtgtacctggtcgtgctcctcctggccgccgtcgcggtggcgccgctcacgacggtcgtcaactcaatcgcgcccgcacgatcatggaggtcaggtccatggagtaatactcaacaggcccgctccgatcg

SEQ ID NO: 461027 - DNA, 140 bp, Sorghum bicolor
gcgtccggtgcacggcacacgagaaacggcgagcgcagcgacttggcgaggcgcgacgtccggcccagctggtacgtcgcgcccgctcctgacaggcgagatgcgttccggccacctgatgattgaccacgagaccctga

SEQ ID NO: 461028 - DNA, 190 bp, Sorghum bicolor
cgtccgaagcaacattacttctgagtcctatgcagaaaagtatggtccatctagcggttcttttgaacaaacgaattcacacgcccagtacggagctctgtacatgcaacccagcattcaacaaatcataatgacataaaccaaccttcgttatcattgcctacaacagcttcttatgactgataaatct

SEQ ID NO: 461029 - DNA, 321 bp, Sorghum bicolor
  unsure (1)..(321): unsure at all n locations
cgtccggtccanctgtccacgtttcactcctcgcacttgtccgcctcgtcgcctcgcttttttttgtggaacgtagaatggcagcttcctcgccgcccctcccgccgccgccgccggcagcgtcctccaccacgctggccggaaacctcacggcctcctcgctcctgtccatcccgcgcccgcgcccgcgcctcgccgcggcgcaccgccgggcggcgtggccgcgtccgtgtcgccacggccccggcccccgcagccgtcgtcggaggaggacggcgactagaacgaggcggagagggcaattgggatagacagctgatt

SEQ ID NO: 461030 - DNA, 296 bp, Sorghum bicolor
cgtccgatctacagccgatctcagtgctacttaaacacaccgatacgatgtatagcctcatggagaagggagcatccacccgatcgtaaagccgatggtacagagcactaccagcgctcatctgtctattgtgcctgatcccctgcgtgcacggctggtcgttcatccggccgctcgcgcacctccgacgtgcacagtcgctcagtactcgcatctatctacacggatggcgattcgtgaggcgctctcctaaataacaggttgctgacggccgcttgcctccaggcgctatctcc

SEQ ID NO: 461031 - DNA, 469 bp, Sorghum bicolor
cgtccggtcccgcttccgcagccagccaacgcaacccccgaacccaaaaccctaccacggcgcccatggcctcgccgccgccgtctcctgcgccgcaccccacttccgcagcagccgcagctgcggtgggcaatggtcacgccacctccgcttcgccggtggacgcgctcttcctccagaacctcatgagccgcgtccagctccgcccgcccttcctcgacaccaactcattcctcacccaggaccttgacgacttcctcctcaacgagttcgccgcgctatccgccgccgcaggggcgtcggatgatgacgaagacgaggaggatgaggacggtgggctcgctggcggtgagggctccggggaggcgaggcggcggcggatgctggcgagggaagaggcgaagttggagaaagagatcctgcggatggtgctggccgtggaggccgaggacaagcctaagcccaattc

SEQ ID NO: 461032 - DNA, 143 bp, Sorghum bicolor
cgtccgcgcacacaagtctcagctactactgctagctcccaaccgaaccgaggagaaggacgccgtgcaggtgcagctcgggcgcgcgcgcggcgagcgccaggaaggagaagaagaatgtaccaggccataccgtacagggc

SEQ ID NO: 461033 - DNA, 153 bp, Sorghum bicolor
cgtccgctcccacaactcatacctgatacttctagttgcgaacccaatcgaggagaagccttcctcgaacgtgcagatcatgcgcgggagagcgtgatgaagatgggcgaagaagaatgtaccaggccataccgtacagcgcctgccggtcgt

SEQ ID NO: 461034 - DNA, 394 bp, Sorghum bicolor
gcgtccgcccgcgcgtgcgaaaggagacgtttcacctgatgatctttatgccgttattaacaagagaattgagagagtctagagtcgtacggaaggtggttcgttccaacaacgcatactggttgagtatctaaatgagatacaggctagagcagaggaagtcgacaaagtgctccagggaccaacaatataaaatgtgctgatcctgtttacactatacatgttgtcctgtgtgccggcatctgatggagcaatggcttaattttattgaagtagcttggcagagaactaggagtagatatgcctgatgctggacctgatcacacaaagagcacagggaatggagagaagagattagccagttgaagcgcacattacagcaaattgcccttgc

SEQ ID NO: 461035 - DNA, 383 bp, Sorghum bicolor
cgacccacgcgtccgatgtctctctactgcgctgcggtccatcagcagaggagcttatggcatcctaggtcatggacgacaactactgcatcaccggcgccgtgatgtcatcttgtgatgcgatgactgacactcagaatactgctgatggactcttatcctatgactggtgaggtggcttgtctgttttctttaacattatcatcatcatctctttagctgactctgcttttcttttggttctccttaagtttgattgtatgctttatttgttgtctttgtagttttatatttatgagtttgtttttatagttttatgtttctattttatatatttttcactttgtacttatcttatattttttatgtttaattttttttta

SEQ ID NO: 461036 - DNA, 56 bp, Sorghum bicolor
ccggtcgacccacgcgtccggatcgctagccgctccccttttttattttttcacca

SEQ ID NO: 461037 - DNA, 417 bp, Sorghum bicolor
  unsure (1)..(417): unsure at all n locations
tccgnattcccggtcgaccacgcgtccgctgggcagatacgcgaacactcacgcagacacacacagtgcaccttcgaaggcgctgcagaggcgagcagatctcgcctgattcgattctacaatgaatcccatgcactactacattatcaaacttctgcttattggcgattctattgtcaggtaatcaggctcgctcttcagatatgcatgggatatcacatctgtacagttacatcttctcacgcaggagcagattttaaacagcagccagtgcagccagaacggatgaccatatgacctgataaagctgttcacgatcaccgggagcagtatttgattaaggctacacgctaacacctgccggtcggtgaccacattcttgaccactaactggcaagctacaactgcagtggtcct

SEQ ID NO: 461038 - DNA, 345 bp, Sorghum bicolor
acatgaacaaaaacaagaccagagattaaccgccagatttagagccagtagtaatcgttgcagagattgacatttacaagcatatatgcacgcttatatgctcgctagttggctacaaggtgtgcgaaaggcagcatgctaagcaactgggcaagtcataggggcgttgatagtggcattgtgtgtaattacatgcttcactacataagccatactggatgtggtactggcttgggactgtgccagtttattgaacatgttagcgaacaagttgctgtacaatttggcgtacttcttgatgtactccttgagggtctcgtatagggacttgacatccaagttgac

SEQ ID NO: 461039 - DNA, 404 bp, Sorghum bicolor
  unsure (1)..(404): unsure at all n locations
cgtccgggcgtccgtcatcgcaaaactcttctcgcacgcgtcgccgcccgcaccgcacagatcaacaaccgctcgaaattttgggggaagcaagagagcagcagagcagcgcgcatcgcgaagcggagagatggaggcgccggctcgcctccccatctccctcctcgtcgtctccgccctcctcctcctcctctcggctcagggaccggcgggagcggcggcggggncgtgccgccgcgaatccagccgctcgctaccgccgcgcctgcgccgctctacgacacctccaactacggcaggctgcagctcaacaacggcctcgcgctcactccgcagatggggtggaacagctggaatntcttcgcttgcaacatcaatgagacggtcatccgcgagacagctga

SEQ ID NO: 461040 - DNA, 356 bp, Sorghum bicolor
tttttctatcaagttcaaccactgaaacacacggttgccaaattctgctatttgactgcaataatcttctggtttctataaggacgtatatccttttacatatcgacaggcacacaactatttcctttgagaggatccagatacattagcacaatagcaccaatgttctacttcccaccccaaaagcagttttaacaagcaagacaagtagtgcctgcaaagatgacgatcagcacgtggaaattatctactgaaacagtgttacatgtcaaaacacaacagctactgggaattctcgtcaggctgggcccaatcgcttcactgtgctacacgtggtaaaacaacatactacaaag

SEQ ID NO: 461041 - DNA, 371 bp, Sorghum bicolor
cgtccgacatgctcgacctcaccttcatcatcaccgtccccacctcctcctcctactatagtaaaggaggcagaggtgtcatcatgtagatggcgtcaataagcggggttcatcagcaatggactcagggaagcctccaaggcctgttgaaggcggtgctggtcaggctggattttgttttggggtgagcgatacgaagcaaacgccgaagccgagaggtccgaacaccagccggaggaggaacggccggaaacagaagctgtcatccaagcacgatgtttcatctgaagatgaaacggccggttcctagcaccagcagctaccgtagcagtttgacctgtggctttggtgatatcattcattggtccttt

SEQ ID NO: 461042 - DNA, 226 bp, Sorghum bicolor
acgcgtccgcggacgcgtgggtcttagtagagagtatatatttctgtgggcagcgttcaggcaattaatatgtgaggtgttaacaatgctgttttgccctcccaagtctctacagtcgctctagaggaagcaaaaaagactttacctggtgattagtatgaataatgaacgcttaggttcacttcagagttccgagatctacaggaaatggctaaccgcatcaagg

SEQ ID NO: 461043 - DNA, 474 bp, Sorghum bicolor
cgtccgctatggagtatgtcctgcggcaatgtcttggtcagagagatattcacatgagttggaagctccagtacctcctatagtcccaggagggaaatttactctctcggatgttacgggaggagcactgcttgtgattgtttcagagatattcatggatataatgcaactacaaggactacactgacaatcggtgcaagtgaaaggacatataacagttacaacttgcatttagacagaacgcgaggtttttgtcgcattaatacagaccacgggcatgtatcaaaagcgtagtcagaacccaaaagcaatcaagtgcagtacgtgcttgcagcttcatcgagcatcgatgctggaattgaattgctatgatgagattcgcaggagatactgtcaaacacgagtagtataacgtattcggtagtctctctatatatcattcactatagagtgaaggccattcaacatatttca

SEQ ID NO: 461044 - DNA, 295 bp, Sorghum bicolor
tttttttttttattttatcttaatttttttcatttttttttttttttttataatttaattatttttttttatttttgttgtttgttatttttttttttttttttttttttttatattttttttttttttttttttttttttatttttttattttttattttgttattttttattatatttttatttttattttatttttttttatattaatttttataaatatttttttttttttttttgttttttatttatttttttattttattattttttttaatatttttttttttttttt

SEQ ID NO: 461045 - DNA, 429 bp, Sorghum bicolor
cgtccgcaaaaaaaaaaaatctcaacaattttcaaacttcagtttttggtaaaggttaatagataccaaacaaaggattctagtgtttaatacatcctatattatttggctagtgccagcctttgggatagaatcctctaccaaataaatagcaaatttatttggatggaaggagtgtatctctaattaaatacatacgacaagcatttatatggagcaaacgtcagaaggttatcaacggtaagcttgactgaccttgagttgaacaaaaacttccgtggagatgtatctttggcaatgaattggacaggtaaaatctacctagacagatgacgttcatggacacttcagctaaataaatgagtagagatagcatatctttctcaagagataggggactaagggagtcactagtaatgattatgcaaa

SEQ ID NO: 461046 - DNA, 472 bp, Sorghum bicolor
  unsure (1)..(472): unsure at all n locations
cgtccgaccctctccgttcgtagttgctctaatttggtatccccaaggcccaatccaaattttcacttttgtttttgctccttttgtgatttaaagcttaacagatgacctaaatcctacttcgatcgttctaattaacccgtgattgtctagcaagacaaacagatataagatcttcaagctgttctttgttgggttgcattggtagatttgacagtgtaggtgtatcttgtagcaaaagaaggatctgctgtgctccttgtcatgtttgatatggctaatttatattcttcggcaatacagtataggtagaatgtgaatttataacatggttatccagaatccaagtaggttcatgcactntgctgtgtgtggtccccttgattcattgaagaaagtaataaattccgtagttttcggagtcggtggagtttctaatcatttcttttcgatatttggtttctgaccagct

SEQ ID NO: 461047 - DNA, 152 bp, Sorghum bicolor
aggccgtgagtgtctggcattgtatcactgctatacgaggcagcccatcccaacgtccaaggcactacctgatactagagacaatctcgtgcatataaatacgccttctggccatacaactgatcaccaagattctaatggctatggaaata

SEQ ID NO: 461048 - DNA, 427 bp, Sorghum bicolor
cgtccgcccatgcccgtgcggtttaattgtagcagaggatggctagcctataggacacagcgatgccgatgaggcggaggagcacgaggtccgtcgccccttcgccgaccacctctccgtcgccgtctggccgccgagaaccgcagcccccgtcccggcttcttccccagaggaagttttcccaggtcctgggcgaactgccgtccgccgtcgtcgacgcccaccgcgacggcgctccccgtccccaggatgacgacgcggacgaaatttcggccatcgagttcgacggccgcggcgagtacctggccgccggtgacaacgccgggcgcgtcatcctcttccggaggaccgacgactgctacggtgacggcgacggctcgctgttgcgggctcgtgccgagcttgagcgcgctgatcgtgcctgcgg

SEQ ID NO: 461049 - DNA, 146 bp, Sorghum bicolor
gtatacaaaggccgacgacgcttcaacgtgcagctgaggaaggacccctgcgcataccggggtggtcccgggcgtatgaggctcgcgtttgtttctctttgagtgcgttccgagttaaggtcttggcgtagtacgctaccaaatgt

SEQ ID NO: 461050 - DNA, 154 bp, Sorghum bicolor
cgtccgagaaccgattatgcatgttcactgatgatgtaccggggacagctggagttgctctagctagcgcctacttggagctggagagcacatggccctcctctccaggataggacgaatcaaaagatagtcggctgtgggagctgggagtgct

SEQ ID NO: 461051 - DNA, 417 bp, Sorghum bicolor
cgtccgcactgatccaagctgtgaaggaaaagggacgaaaagaacacagcgttgccaagcagtcggcccatgacaaggacaacctaccgtgcttccctaggtcaaaccctggacagcaaaaacaccctctttgccggtaaattccaacaacggggccaggtcagggtctatcacatatctcaagcggctattcaacaagcaagaacatggaaatagaagacagacttgaaacaaaagggttaatatagctattgcatgcttcagtcattatatagaggagttctagcacttgtgtatctccatgcggtgccctttggtgtccgtcgtatatactgcaatatacacaaaatcagatccatgagatgttgacatgtcttctttgattatcatgagttcttctgaatcgctatactatct

SEQ ID NO: 461052 - DNA, 434 bp, Sorghum bicolor
cgtccgcccacgcgtccgcgcagcgcccatcatcgatccgcccccggcccgtctgttcgccaccatttccttcacccccttcttcaatcccctccatcattcgctccaatactccgcccctcccccccgaccgctttctccaccatcagggcgaaaattttatgcgcgctttgggaaagcgcgagttagttttgctgcgaagctgcctgcctttttatccatccggggctgcgggcgtcgggagaagcacaggttcgagtccggctccgtgtactccggccgggcgtgggaaccgaggcggcagcggcggcaagagagagctagagagggggatctgatcgatgtcgtcggacgaggacggctactgcagctcggattcaccgcgggcggaatccctcgacgagccgctgctggctgcggcggtggcggacgcg

SEQ ID NO: 461053 - DNA, 261 bp, Sorghum bicolor
cgtccggagcagcagcagagccgatcccgtgcgtgtgcgagtgtgagtgagatcgacaccactagctaggtcgagaccatggctacagcttacgctcccatggcgagccaggtgagaagagcagctgagtgactcaagccgagggctgccgcctgcctaccaccagcgtccggtacgcagcatcacccgaggactccaggggagcatccggacgcatgagcgaaccgggctaccctgggtgccttcactgcggtccacgcg

SEQ ID NO: 461054 - DNA, 405 bp, Sorghum bicolor
aagaccatctgaaaagagcggaggggctagaatgaatgcgcactgctgtgggagacacatgctaactcgcaacggatcgtatgctaggctaactgatgcgcatatggtgtggagtcatactccaccacgaggacgagaagcccaacacaatgacctgcggaggtgaaactgcgttccatgaagaaaatcatgcccttcaaaaggtgcttactaatcaagatcatggatgagcagctggtatatagcggcgagaacgaaatgctgtagatctgcatgtatgcatttacggagaactggcgttggagagagaatacttttgcgagcattgcatacgattgtgagaccagtgcaacacttacacaggaaattaatgccacgtttgctgctgaggacaatccgactgct

SEQ ID NO: 461055 - DNA, 486 bp, Sorghum bicolor
cgtccgctcccatgtcggaaaacggcccttccctgctttcaaaaaatgctggggaattcagcaattcaacagacgaattaattccagaaattagatttccatctgactgtgttccagaaagcgcaattcctaaaacaagtgggatatctaggacctacaaaatagaagttcatggggttcttgataatttaccagcaccagttaaccgcaacactgcaatgcttgaaaggtttggcatggtgcctgaatattacaaaacaggaaacaaatatagaggaaaagatggatctagagtagaagggaaatctttaagccaagagcaagcattgctcatgacaaaaaagttggttgctcgctacttagcaaatttacgttttgaaagtggaactgcagtctctattgatattctttcagaaataataattaagcacatatgtaaactgggacgcaacttgaagcttctaactgacagctacaggaagcaat

SEQ ID NO: 461056 - DNA, 211 bp, Sorghum bicolor
cgtccgcccatttatccctctccatcaatcaagaaataaacaagaaggttctgccaacttgctacttgctagctcaccacaatggcctcctcatgctccttctgcttcctactcgcggcggtggcattgacgacattatttgccattggctcatgcggcactacgctcaccatcgaggtcggtaaggactccaccttcaccaaactattcc

SEQ ID NO: 461057 - DNA, 386 bp, Sorghum bicolor
acgcgtccgaaaaaaaaaaaaaaaaaactaaaaacacaaaaaaaaaaaaaaaaaaaaaaaaaaaaattaaaaaatataaatataaaaaaatgggggttggggatatataaatggggagtaggggctcttcttttataaaaatccaattttatgggggggggcctttttttaagtacccatttttatttccccttctttccaacataaaatttttttttttttgcccctttattttttttcatcgcccgggtttttaaaacgtttggctttaaaaaaccttgtttttcccaattttattttttttaaaacaaattcccttttcccatgttgttttaaaaaaaaaaggccccttattttttctttttccaaaatttttccaacctttt

SEQ ID NO: 461058 - DNA, 468 bp, Sorghum bicolor
cgtccgggagccgccggctcccgctcccgcgccggttttagccgtgccccccgtggcgctagccgcggcggttgaccagcgcgttctctgctccactggccggatcgggccacaggcgcccgccgtggtgccgacgaagaggatggtgtccgcccccgccgcatccagcgcggccgtgtacgccggcccggcgttttctgccgcggcgcccgagccgagttcactccccatgcccgccttcttcctccggcgcgcggagtccgaggccacccggggcctccggtgcctcctccgcatcggcgaggctcgcctgacacggctgacgttctctcgaccagcctctgtctactacttcgttcaccccttcggcttcgtctcttctactcttcctccctcgtctccggtggttccttgatctatgggatggtggcgcctgattggcggtgttggatccgatggaaagctagc

SEQ ID NO: 461059 - DNA, 161 bp, Sorghum bicolor
cgtccgtatgggcttatggcagatgcactaccatgagatgtctttataattgttgtgtacatcagattcggtggtacccccatacgagtttggaaaaggtgactgtaaattgagaattgtaaattgatcagtaagctcagtgcagtgctagctgttttcct

SEQ ID NO: 461060 - DNA, 75 bp, Sorghum bicolor
actgatagccttaatgaaaaatgggacgcctcctggagcaatgaataaccccctgtagcgtgcattaacccccac

SEQ ID NO: 461061 - DNA, 434 bp, Sorghum bicolor
  unsure (1)..(434): unsure at all n locations
cgtccgcccaacctcacttgctaggtagctaggcgagcggcgtcggcgagtcctttggctcctcgtcgcacggctcgtccagaataaataaatgcttggcatcgcacccttcgcgaaacctagttttgcgacggaacgtgctagcaagcagtaataataaaacgccggggctgagcccgtttgttcaaccggaataatgaagcaactgtattatatgcatgttgcctcgaaacagtgtgtacgattgcagatcgcttgtactctttacggttgcagcgagggtttaaaaactgaaccaaaggtccttatgggtctttccagaagaatagcttgcaaaaagtgcggcgacttgcatctttggatttatacttgangagcttaatcacaaagctagatggtgtcaggactgcaaggagttccatcaagctaaagat

SEQ ID NO: 461062 - DNA, 383 bp, Sorghum bicolor
cgtccggtccatacaagctctctctggttactaagcttcagcaggttaacctgtcttgtggttgttgaggctcgaggtgagctagccgccatggagtgcggtaatgacagtcacaatccctcgaacgaccacaatgtatagcacggaaggtacctcggtggctacggccatgatcccgccggttacaatgttataccaaccgtgccatacgcttccaagcatgtacaagggatcaaatctccacttggcgaggacaaggcttcaggtgattacaataaaattgcaaacttgtctttagggaggagatagccgttgccatcatgaatgctgcgcctgcagacaagaagctaatgatgatggacgactccttcaactctgtagct

SEQ ID NO: 461063 - DNA, 255 bp, Sorghum bicolor
gggacggcccccacccaaagggttcaccccacccaattttgtcttttttaatacagggtttcaacaaaatttcacttggtaaataaaaaaggttaaccgattacaatttttaacacccaatttttaaaaatccttaatgttaaaccaaaaatggtggatcatttttttaaccaaacggccaatttattgtcattcaaatacaacccctatatccctaaaaagggctttttaatttttaaatattctctttaaaaa

SEQ ID NO: 461064 - DNA, 378 bp, Sorghum bicolor
cgtccgtggacatttctggcttttatgttgccacacagagaactcaaatggactctattgagcatttctagcatctatagttgtgcgtagacttgatttcatattataaaatggctatgtatttgtatggagaaagacttattccttgcaaagggtttggtggaagcaacatgatttcagacaagtgaagtgtggtcacttctagtagtgaagagactcatattttgttcttttttttacctgtctagaatctgtggatggagacaaatttgtgatgcatgtattaggttgtttagatattgttattacttattagatggcacctgaatcaaacttctgcatgaatatgactcttatttctgatgcagatcttctcac

SEQ ID NO: 461065 - DNA, 470 bp, Sorghum bicolor
  unsure (1)..(470): unsure at all n locations
cgtccggaaaatcaaaagggaagtacgcatggtttctatgagatgtacgcaagttctacttggactggcatgtcaagtcttatggttctccttgactggtttgatttccctcagcaggagtgcacgctgatatcaagctgtggaggtggtggtgctggtcggcagacgcattgtggcattcaacatggtagcgacggtgggcaggtggcctaaggccatcctgccggcaggcgcattgtggcattcaacatggtagcgacggtgggccggtggcgtaaggccatcctgccggaatggttgttgtcaggcacagactgaggcgccacaggattgctttcctggttagattagagataaatcaaattggtgcttgtgcatgattttattagaggtatcaattgttactttcaaaaacaaagaggtaccaattgtttggtctactttatatntaatctgtattatgttaaaaa

SEQ ID NO: 461066 - DNA, 130 bp, Sorghum bicolor
cgtccgatgacactgagctaatcatagatcgcaagcgaaaccacatagggagcaaagctaacatacacagacatagcgatgcatatcatcttgtatagagctacctaaagagaacacaccggccgaaaag

SEQ ID NO: 461067 - DNA, 64 bp, Sorghum bicolor
cgtccgcccacgcgtccggtaatatgctggttatgttattggtatagtatatgtcaaaccaaaa

SEQ ID NO: 461068 - DNA, 417 bp, Sorghum bicolor
gcgtccgccaaaccccctcgccgctgcggccaagggtttcacccgccgcggaaagcattgcaaggtgccgagggatttctgagtagaggagttggagagccatgggcactcttgcttcactggtgcctttcttgcacttgctggaaaggaccattaatcaactttcaaattggaggtctattgcttcttaacttttcttgattggggggcttgattaagcaattcttccattttttgcttgtgtggatattggtggtttcttcaagtgagcccaatgcacaaaaaaactcggcacacaagtccacatattgctctttcgctctcggtgtaccaaaacagcttaaaggcagatgacatcttgagcgctgtgttcgagttgtcaatgtacaaccattcaaaagggacatatcatggatg

SEQ ID NO: 461069 - DNA, 428 bp, Sorghum bicolor
  unsure (1)..(428): unsure at all n locations
cgtccggagatcgtggacccgaggctgcggggcgactacgacccgacggaggcggcgcgcctggtcgccagcgccgccgccgccgtgcgccacgcggcgcggcgccgccccaagatgagccagatcgtgctggcgctgcagggggccatgccgctggaggagctcaacgacggggtgcgcccgggccacggcgccgcgttcggctccggctcggggtcgtcggggtccgctggctcgggctccgactacggcggctccgacggctcgtcgtacacggcgcagatggagcggatcaggcgggccgcgatgcctagcccggagtacagcgccgactaccctggctctgtcccggagtagggacacccgtcgccggcgagctccgacgagcgggaagaccggcggcattcgggaggtcgccgntgagtgac

SEQ ID NO: 461070 - DNA, 419 bp, Sorghum bicolor
cgtccggaggtctacggcgtcgacgccgttgagcggatgctgcaggacttcatcgctggcaatggcgccggcgccggcgccgaggccgacgcatccagggaccgtgcctccatcgacttggccagccgggacgtcgacagcaacgacaccaccgctcagcaggcgcgccaggttcacgctaagctggatggcaacggcggcgctgggactgggaggaacgacagcagcagcgccggcgacgcgaagaacaacggctccaggagcggcgacgcgaagctgccgccgccgctgggaaaggaggcgaagcccccgcaggtagcgtcggcgccggggtcgtcgacggggcggatccacagcgacggcgtgctaaagatcctgatgcaaaagatgcggtcgctggagctgagcctgtcgacgct

SEQ ID NO: 461071 - DNA, 398 bp, Sorghum bicolor
tttttgacctactccaacaatgtatagaaacttatgctcacaagcattaagaatacaaaagtgcatagaagtgctctattgtgtgtatagaaacttatgcacacaagcataagaacaccaaatttaacaaacaaaatgcaaaaatccttggtcacgtcgcgctgctcctttgctatcttccatccaaccgaccaccaccgctgattcgcattagcgccgccaccgtgaactaccagcaccgcggccatggattgcatcatgcatggacttgccaccagaatggttttgcgttgatagcttttcatttcatgcaaaccacctattcatccaaggctgcaaccaaaaatcagataaaacccatacaactaagcatagaagaattgggcgcagataattat

SEQ ID NO: 461072 - DNA, 393 bp, Sorghum bicolor
cgtccgaaaaaaaaaaaaaaaaaaaaaaacaatataaaaaaaaacaaaattacatacacaaaaaatacaaaaaaataaaataaaatatagtgtgacgggaaataaattaacataaccaaaaatatacaacaaaaaaaactaaaaaaaactctaaaataacaaaaaaaggggcgcctttttttaaataaccaattttttcatcccgtgtattaccaaatttacctttttttttttgcccctcaaaacaaattctcagcccccttttttaaaaacactcgccttggaaaaccccttttttccccaattttatgccttttacacacaatactttttttacacttgccagtaataaaaaaaacgccccaccttatttctttcctaaaaatttcccca

SEQ ID NO: 461073 - DNA, 70 bp, Sorghum bicolor
cgtccgcggacgcgtgggcatgtaaataccttttttttcatcattcgatcgatctacaggggtgatgaac

SEQ ID NO: 461074 - DNA, 434 bp, Sorghum bicolor
cgtccgacttcacccagttccttcttgacagcgaggatgattcggatgcctttgaaccaccagctttctgcaagtttggtagcatgaaggcaagttccaggaatccactatccaagctagatgagtgtgatgaggaggatgaagatgagaccgaggacgacgaagatgatgacatcttgaccagtgcattgccccagaagattccttctatctccaagctgtcgtcgtccatgaaggggcttggcttcatcgggaaatctaaactctaccgtagaggagttccaaagggtaaagtgacaggtagaactaactacagtggcaaagctagtgagcatcagtccgggagcaggagcgccaacgagctgctcccgcccagcgccagttttgtgaagctgtcggacatgagccctaaagagtggagtgcattccttgag

SEQ ID NO: 461075 - DNA, 427 bp, Sorghum bicolor
cccggatcgacgcacgcgtccgcaataacggattttcttaagagaactctattgtgatcttcgacactccattttgtcctcataggtcttcattgtcgagaaagaaaatacttttgtgcttttaattggcatctaacagatctcatcatacacttaattatttgttaaagttttgtcaagtttatcatgttttgcagtctaacacttatggctgtactaatatctgttgttactaataattttccttcttttatttgcaactaaaaagaaaagctccctatgtgtgggatatgatactactgagtcaattgaatggactatgaccagtcttgggttcatttaaggagttagcagtgtacttaggaccccccaatactgctgatctgctaggacatatacaagtcaaaaagcttattaatccctccaa

SEQ ID NO: 461076 - DNA, 426 bp, Sorghum bicolor
cgtccggcggctggggtgagctcagagccttctgccaatgagagccacaagaccacaaccggagcagatagtgaggcaggtggagacgtggcggagaaatcctaagccaagcaccctgggctgggtgaaaataatgccttgtatactagcaacgaaagagaaggactcttgaatgacaactactagtccttaccagtttactgtgtggtttagatggtcagtctcatcgattgatgtagaacaaagtttagattggtggtgtaatctgtccaagatactgcgttcttacattgctgtagccattaccgaatgattcatataagcctgttgcccaagtggattttatctatgtttatgagctgatgtaacttggtaagtaaaactgatgtaacttggtaggaaaactggctcgcagtgcttttacat

SEQ ID NO: 461077 - DNA, 277 bp, Sorghum bicolor
cgtccgtctagaaccgtggagctgcgcctgtgtgatgagaagattagtccaggctgagaatgagacgatagctgagttgaggaaaatgtgcacctcgaagctgaagctccttgcgtccgcatcagcttccctgaacttagtgttgcactagtcttggaaattttggtcgttgagattttttctcctcatcccgactgttgtgccttcctctgctcccttgatgttgtaaactaatgtgcgtttgtgtttgttgtttctatgcaattttgatttgagt

SEQ ID NO: 461078 - DNA, 479 bp, Sorghum bicolor
cgtccgcccacgcgtccgcaaattgcaaatagctgtacatattttagcatatgctactattttatgaaaaaacaaatagctgagattgagatgctagcaattgtttaagaacacaagccagtattgccaacatgcctaaaagtattagcaaatttcattgcattgtcatctgagattgcaaatagctcagacatagacctacagttcctaattagtgtactactatacttttgatcaatttaggttgggagattccctgcagttcttctagttattaatgatcaaattgatgttaatttatttttcaggtagcattgggcaccactaactgcttacaaatgaatgggatgccaaattttgcgcaactactgcatttggatccaagtatttcttttgttttatgagcttttggaacaacttggggactttacttgttaggaaggcaagaacctgttggtgggtccatacatctctttttg

SEQ ID NO: 461079 - DNA, 436 bp, Sorghum bicolor
cgtccggttgataatccttcatcagggtctcatgagactggtcaccatgaagagggtttgctgattgacctggggaatgaccatgatgcttttggggaagcttcagaaagcacagatgcttccgcatcttctgtacctgcatcagatcttctgagtatcgatcagcttcttgaaacggttggtgcagaaccagcacctcaggctggagtagtgtcagcagacattggattcaaggatatgactagccactgcgaagccctgacgatcgggaaacagcagaaaatgtccgccttcatgagcttccagcaaagcgtgcaagcgtctgggcttgcaagcagccaacccaaccagatggagttggaccttttccaagacccgcagttgcctcaagccgggacacataacacgaacccattcgctgatgacaggcttcaag

SEQ ID NO: 461080 - DNA, 373 bp, Sorghum bicolor
cgtccgcaaacacgggtttcggaaacgaggccatccaactaaacggaacagctggtcagtccacactagaaggtggtcacgaaaagttgcaggcaaccgtaagaaagatcctagagatggttgacgcccaggaagaagcaatgccgccaatgtcgcccccaggttttcttgagctgactgaaagcgccactgctttgtcatgatgcaatgcggggtcctggaggcgttgtcgagtacttactcagtcaggtttagccatgcatgctgtcttgagcataccgtcatacggataacataggcttgtttggtcttcgttgctgtgtcttgcaaccctcaatgtatgtgttgggctgatgtaaaatcgcttcaaaaa

SEQ ID NO: 461081 - DNA, 304 bp, Sorghum bicolor
cgtccgagaaaacacaagacagggccatggaggttagaagagccaagttgcgagtgctcgaagcattcacagaggagtgcacacctgtagtacatcgcaaaaatgcacacactagtacctgggggcggcccctcgggattaaaaacaaggactaaaaattcctccccaataaattttttgtttaccaggatttttttattctaaaatcttatcggccattttgggtttgttcacttcctggagccccccagcaaagaaaaaccccccgggaaaatcaattcccatttaaagggcgctgggcggt

SEQ ID NO: 461082 - DNA, 54 bp, Sorghum bicolor
cgtccgaaaaaaaaaaaaaaaaaaatccatattataaaaaaaaaaaaaaaatat

SEQ ID NO: 461083 - DNA, 530 bp, Sorghum bicolor
  unsure (1)..(530): unsure at all n locations
cgtccggcagaaaatgatgctgaagctgcaaaggcttttctcgatgctgtcactttatcaatgagaagcaggaatgctgcttccgtgatgcttcgagcttgctgatcctttacccatgccgtcatatggttttggccagcagaacactggtgttctgctgcaaagattttctggatagatgagtttcttgtatagccttatagatcgtgacgcatcaacgggaggggttttcaacatcttgctgctggtcctgtgctgtgcagccaatctacaatggacaatatgataacaagaatgatcgggaaagtagtcttcaatttttttgttttctccccattgttttgctttgtaattaaactctagccttttcccttaattagttgatgaagtgaattgatgtcgnctaatagaacaactgtagtgaaaagaaaatgtcagaaaagctgcttagtaatgcaaattgctgtgatagtatgttctagatatgttatttgatggcagcgttcgagataaaaaaaaaaaaaaaggaa

SEQ ID NO: 461084 - DNA, 407 bp, Sorghum bicolor
cgtccgccacccaccacccccgttggtcttggtctcggtctcggtctcgtctcgtcggccaccgccacctccgccgccgatgcgggtccgtctccagcacctccttttttggattcaaatcccaactcctcattccctcgccaacacttgcctccttgttggattcctcctcgtcgatgtagcatcgaagccatcacgcctatggagcggcggcaagctcaactgatggccaatacgccaatgctgcacagcaagtttgtccacctcaagaagctaagtattgctgttaccgcatggagaagctaagtattagtcttagtgcagtgacctgtactccggcctatgattatttttctctagtttcctttcttgactcttgccctccttggagacactggtcttggatg

SEQ ID NO: 461085 - DNA, 142 bp, Sorghum bicolor
cgtccgcggttagcaagttacgcggagcgtctacagcatccagactcacacacgcacggacgcatcatcctagaggagctatagcgcgccatgcactcaattcactccccgttcacttactgcgggatcactggaggaaccc

SEQ ID NO: 461086 - DNA, 142 bp, Sorghum bicolor
cgtccgcttccgaccgcacctcctcacgcgctcgctcgccttcgcttcgtcgccacggcgagccccaccacgccgccgatcggggcgccgtcagcgctgccagcggcagaggcggcgcccgatccgatggacgcggaggtgg

SEQ ID NO: 461087 - DNA, 250 bp, Sorghum bicolor
  unsure (1)..(250): unsure at all n locations
cgtcncgaaaatccacgacgaagtacctgtattttgttaggaaaccgataggcagaaattatccggactgtacttctgacaagagcgtgatttgtttgttactactactcctacgtcctaccgagagagtttctttacaatagctgaccatgcatctaaaaccgatgcgtttttgtttttccatggtactgtgcgcgttcagattccaacttcacccccccattgtttacaaacacccgtgcgacntatt

SEQ ID NO: 461088 - DNA, 417 bp, Sorghum bicolor
  unsure (1)..(417): unsure at all n locations
cgtccgcggacgcgtgggatcggtttggaaggcaagttcggccatatcatcggacagcagttttatggacagcatgcacacagccatcatgcactctggacaacctcctccagaactcaaacgagagcttcttgtacaccggtaagctggtgaagcatggtggcgtgccagatagcatactcgacggctgggacctggtagagcgtgaggtcctaccaccaccaccctcgcaggttgaagacgtcgcgcantgggaaagagccatgtatgctggcaccaaaaagaaatgacctctatttacatgtcctcaaccattagaacactgcaagagctttagatatgtacctgatcatcaggttcaggttctggttctggttcatgtacagtagcagtacagagtaaccttaccctggctgg

SEQ ID NO: 461089 - DNA, 217 bp, Sorghum bicolor
cgtccgcggacgcgtgggcaagagagctttttctgagatctggtgtgtctgatcaagtgaatatgtacctacgtattgttgtgttcttaattctacattgtacagctttacactacacaaaggtacgggaatgctgaggtgtaacatccatatacaatatacttagttctgttcatccaaaaaaaaaaaaaaaaaaaaaaaaaaaaaaaatgaaaaa

SEQ ID NO: 461090 - DNA, 303 bp, Sorghum bicolor
cgtccgcccacgcgtccggcaaagttgtactacctgaaagataagcttccccgcttttcaaccttcaagtgaaataagatatgatgacagaacagcttcttccaccaccatttcgatttctcgtagcgaaccttttttcacttccgctgtagggttgtatgtcgaattgtagtagggatgtatcttgaacttgcattagggatggatgttggactctgtgatgttgaacttctaatagtaaacctatgatgttgaactttgatggatttttgttggatttatgaaatctgtgtgtgcttgtga

SEQ ID NO: 461091 - DNA, 70 bp, Sorghum bicolor
  unsure (1)..(70): unsure at all n locations
cgtccgntanaaaaatattatttttttatgttatttnnnataagtactagaagaaaattttataaatact

SEQ ID NO: 461092 - DNA, 187 bp, Sorghum bicolor
  unsure (1)..(187): unsure at all n locations
cgtccgcaagatcaatctttttttttgttctttacggaatgctatgaaacactgctatgtacatatttttcaaactacaacaggcattgtaaatggcccatgttgctatgcaaaaaaaaaaaaaaaaaaaaaanannaaaaaaaaaaaaaaaaaaaaaaaaaaaaaaaaaaggggggcctgattaaa

SEQ ID NO: 461093 - DNA, 315 bp, Sorghum bicolor
  unsure (1)..(315): unsure at all n locations
cgtccgcatcatgcgctctctgatgtccaagaaaatctgacaagtacagagcctctctcccagctgcattgtaattagtttctggacctaggaagcttcctatttcctccaatagtaagaggatcgccttgttgtttgagttgaggtcttaatgattcagatctattgtcaaaaaaaaaagagagattcagatcaacctccgtacttgtgattaaaagatcaatatcacangagtggataggttggtctaagccattccgtccttctaatctgacagtcaaaattatgtcatgtgtcctgagaaacataggaagc

SEQ ID NO: 461094 - DNA, 138 bp, Sorghum bicolor
gactaccgccgtggcgggcaagatgcgcagggcgctcaacatctcggggagctgactgacaacatcctggcgctcgtggacaagttctcgagacgctcgccacctggcatccggcttcacgcggtctggcgccacccg

SEQ ID NO: 461095 - DNA, 385 bp, Sorghum bicolor
  unsure (1)..(385): unsure at all n locations
cgtgcgctgttggagaggaggatcatgaaatgcagagaggaaagcctttatatctaagtcaggaaagatacacagccctgacgtatttggtggcgatctggtagccttgaccgaacttctgaagttcttcggcaaacgaccatcagcttttatgattgagtccattttccaaggaacaatgttcaaaggatcttgtggttgtgaatattgtgggaactgtagtgcaacttggtgttgatcctctccggtgattaacgaaagtattacctcaaccaaaggtggtgtagatcctgcaggcttgacgccattcgtcttctgtggtgcactggacctgctgcccccatgtgcctaatgtancagtgtttcattttttctttgtttacta

SEQ ID NO: 461096 - DNA, 65 bp, Sorghum bicolor
cgtgcgcgggcactaggccaacaagtccaaccttcgttacgacagtgacatggcactggacacca

SEQ ID NO: 461097 - DNA, 83 bp, Sorghum bicolor
  unsure (1)..(83): unsure at all n locations
tcggcagccaacaatcanccatactacagatagctagcagcgtcgcaataatggcccgcgcctgcgtgttcctggtcgtgctc

SEQ ID NO: 461098 - DNA, 74 bp, Sorghum bicolor
tcgtgcggcatgttcttaagtatattttggttagggagaagaatggttctcgggtgattgccgggccaggccat

SEQ ID NO: 461099 - DNA, 84 bp, Sorghum bicolor
gcgtccgatgaaaaaaaacaagaacctaatactcatccttatatactaattcactcaccgcatactactgtaaatctacttttt

SEQ ID NO: 461100 - DNA, 228 bp, Sorghum bicolor
  unsure (1)..(228): unsure at all n locations
aatttcattgatctcaatgatgacgtaccaaacgatgacaattctgaggaatcagtantgtcacgtgaatgcgaggtggaaccttcacggaacaaccatcctaaacgaacatttgtgattgatttataggcgccngcttgtgaagaggatgctgcatgggattntgatcaagaaagcgtacagcctaaactcgatgcataccangaagctgacaacagatctgataca

SEQ ID NO: 461101 - DNA, 242 bp, Sorghum bicolor
  unsure (1)..(242): unsure at all n locations
cgtggcgacganagacgagatccgctccgggccggcggcgagtaggatcgccgggcgatgccggtgacggactaccagggctcaacctcctcgcccttctgcttcggccgctcgctgctctcgctcctcanggacaccaccaccgcaatcatgccgtcnggcgaggaagccgacgtcgaggcgttccagcgccacgtcgcgtcaacgctcgcggagctgctgcccgcggcggacgccggtgc

SEQ ID NO: 461102 - DNA, 232 bp, Sorghum bicolor
cgtggcgttgtgagctgatgatgaaagctggagtggactggaggaatacgtcgaggcagtactcgagagcggtttacaacaccctgagccgcaggatgttcaaggatgtgtccctgaagcttgacattaacaatggcccccttgctgcagccgtcaaagaacaacaagcggtgattgaggatgttctactactcctgaagctaactaaacaagatgcagactgaccagtttc

SEQ ID NO: 461103 - DNA, 371 bp, Sorghum bicolor
cgtgcggagaacccccacaaatgtagataggtgcaagggagattagctgctgcttcctcgcaccatttaaggtttggctaaccatgtgctcagagaagggtaaatagaatttgttgcgtgggcatccactgccgtaagttagactatgatctgtgactttttttaagaacatgtatgcaaagttaactgagcaggatcagattgcctcgtgtacatgcatgtagtaatgataatcactgtaacttctggtctcggttgtacccttcaaaactctaaatagcgctacattatatgtgagtcgaagaagcgaagtagcatgcaccatatatgtatactgttcatcataagaaaccctgggggtgttatgtggt

SEQ ID NO: 461104 - DNA, 247 bp, Sorghum bicolor
cgtgcgcggacgcgtgcggtatctacatcatcagcagccgctcttctagatgctcccttattacctcctccttcctacgacatagtggctctggtgtagtaccacctaacaacaaactactcgccgttttacaacaacgtcactactgagacaaccctggtaccacacatattaatcttgttgcacatcatcctcttttcagctggtggaataataacaaagaggccaccaatcatcgttcttaaca

SEQ ID NO: 461105 - DNA, 189 bp, Sorghum bicolor
ccggcctcgccgcgcccccgggcctcaaccttgctgactgcggggtcggcgccgccggcctcgagcagctgatccagcaactcgccgagaacgaccccaaccgctacggcacccctcccgccgccaagtccgccgtcgcctcgctccccgacgttgcagggtcagccgacatgatgcatgccgacggct

SEQ ID NO: 461106 - DNA, 256 bp, Sorghum bicolor
gcttataaaactgtggacgaggtaccactagacgcagaggcacgtcgacaggactggatactcctccctggatcctgatgcgaatggtctaccaaggacccatggtctttcttcatccctccacggattcaatgatggaagctaaccatattcaacccagaagcacatcactgtcaagaggtcaaatcattctctcgagcagcccattttcaaccctaatttgagtggcaacgcgcagtgatgccaccctacacga

SEQ ID NO: 461107 - DNA, 163 bp, Sorghum bicolor
  unsure (1)..(163): unsure at all n locations
aattacccactccacccactcttcggacatgtctatactatccactctcacactctccaaaataacctactctttcttcccacatatatacactttatatattttctatataaacncgcgatactaattcactgtccacaccttcacaacttctaaaccccta

SEQ ID NO: 461108 - DNA, 373 bp, Sorghum bicolor
cgtgcgggctaacctatggaatagatgtcagcttactgatatcacagacgcagacatatgcaatcagaatcagatgtcagattactgacatgatagttcgctactgatatcgttcctctgacaagtgcccaattatcagaagaccaacatcaaccatctgacatcaacccaccgacactccgaccagggcgagcctagaactaatttcttattgttcggagcgctctaacgctcctttctctcgagtgcctctatgtactacatgtctatgcttttgatttcaaatcgtcttccttcgctagcagccctgttctgctcagcaaaactttgtgtgacttttaagtagtaaatgcctatgtacataggatgtatt

SEQ ID NO: 461109 - DNA, 337 bp, Sorghum bicolor
cgtccgtgaaaatacaaaaagctaaaaataaaaaaatgtgggggagtttggcatcagaatatggctatcattggatttggtcctcttcaccatatgcgagtaggctgacagcctgagcaattttctatggactccagcaatctgaagaggattcacatttgaaataatcacaactttttggttgtgttggatggaagatgcttatcaagtagaacaagatgggcagattttggatgaagtatttggtgataatctgggcatcatcgatgtaagcctcaattggtataaagtaacctatctatttgtaccctaatctgaatcaatctctttcccaacc

SEQ ID NO: 461110 - DNA, 215 bp, Sorghum bicolor
cgtccgagcagagctgcagagggcactgccaggagcaccgatggatcaggggatggagctgaggggatgcgtttgtcggatcaagagctcggcacttgagcttctgtccatggaggaggatctgacgactgatctggatgatgacctgtgggatttggtcaggagggatctccagctaaaggccaccttcctgtacattgacctgaaccgtgtga

SEQ ID NO: 461111 - DNA, 164 bp, Sorghum bicolor
cccccctctctcatgtctcgatacgcccgacggccttcccggctcctccgtccggcggcaccctctccagctcaccgaccagctcgccggagatcacgagaggggccaagccctgcccgcgctcctcgacgccgttcgcccgcccagccgccatgggggacgcc

SEQ ID NO: 461112 - DNA, 73 bp, Sorghum bicolor
atgtgcaatggggtcagatgactatgtgtgatgctgagagacgtctgctttgccaacgctctaactggacata

SEQ ID NO: 461113 - DNA, 290 bp, Sorghum bicolor
  unsure (1)..(290): unsure at all n locations
cgtgcgcccacgcgtccggttgaattagcaatggctatcaatgcctccattcaatcagctattgcagagggagtacccaatgttcaggcaaaggcatccactcccaacaacaatggctggagtatccctccaagtaattctcacaacggatggggaccatcagtcactcctgcaccatcaaagacgagtggccaatcccaagcccgggtagatgccccaagcagcagcagcacgtacaatggatgggatgtgcctggaacaagctctngtcaaagttcatcaaaacccca

SEQ ID NO: 461114 - DNA, 93 bp, Sorghum bicolor
acccacgcgtccgaaaaaaaaaaaaaaaaaaaaaaaaaatcaaaaaaaaataaaaaaaaaattaaaaaaaaaaaataaaaaaaatttcaaaaa

SEQ ID NO: 461115 - DNA, 65 bp, Sorghum bicolor
cgcgtccgtccacgcgtgcgcaaaaaaaaaataaaaaaactagaattacatacacaatgcatgcg

SEQ ID NO: 461116 - DNA, 196 bp, Sorghum bicolor
cgtccgcgccgtccgtcggccggggcgtttgtcgccgggccaacacgggatctcggcgctgagtggcgcggcgccgacggcgtgagggaccggttcctggagatgatgatcatcgacggctgcttcgtgctggaggtgatgaaggccaccaaggaggacgggaaacgtaatgtcagtgactacgcgcccaacgacc

SEQ ID NO: 461117 - DNA, 132 bp, Sorghum bicolor
  unsure (1)..(132): unsure at all n locations
gcgtccgtctttttttttttttttgcttttgttttctttccatcacgggagctaggcgctgagnggcgcgcggcccccggctttacggacggggtaaaaactaaacaatcccttgcttttaaaaccccctac

SEQ ID NO: 461118 - DNA, 65 bp, Sorghum bicolor
tcgtcccctcgttgtgagcgcgttagtcactctcctctcacgatcttttggacaatcatactgcg

SEQ ID NO: 461119 - DNA, 74 bp, Sorghum bicolor
cgtccgaacaaacaatacgctcgtactatatcgagagcagcacgctctagaggatccaagaatacaaaacacag

SEQ ID NO: 461120 - DNA, 325 bp, Sorghum bicolor
  unsure (1)..(325): unsure at all n locations
cgtccgcaaagactgcgccaggtgcacaaaggcgagtaggggctagtacagatgcctcagataacatcatatctgatacagacaagatctgtatgcagctatttcttgatattcaggagtatgcacgaaaccttcgtgcgatagaatagatgcgagagaanatgattctacagagctctatggagtgtgttgccccaaagacaaacagagacattcagtttgatgtaagaatgtgcagatataaaaatgcacccgagatcttagatgagggtatctgatgtgtcttggttgaagactatgatgcatcatagatgagactgaattt

SEQ ID NO: 461121 - DNA, 199 bp, Sorghum bicolor
acgcgtccgagagaacccaggccaggagagaggtgaggcacagagagagagagagaacagagaagggggcggaggaaacccttttcttcgccctcgccgacgccttctgctttcccggtcgcgtctacttgggggttctgccgtactcacttgaatgcgccggagagttcttgcgtccgggcgtggcaatccacacata

SEQ ID NO: 461122 - DNA, 70 bp, Sorghum bicolor
ccacgtgtggctgtggagctatattcacacacactttacaatattgtttatgtttagaaaaataggggcc

SEQ ID NO: 461123 - DNA, 427 bp, Sorghum bicolor
cgtccgcgcagaagcagcagcgtgtggaggagcccgcaagctttgtccaagacaagatatatggacgactctgacattgaggaagggctaagcctgcattttgctgatgtccatcagaaggatgaagatgatagacacctggtcatggatcatcaagatcccgcgccagctggtcttccagtaagaataatacctagaagcagtgaccctgtgtaagctggttaaactcaacaggactagttgatgcatgttaacggttgtaatttgtcgtttgaaccacttcagagtcaaatggtgcgtctcgcccataaactggcaaaacagccacagattcttttgtacaggtcagtaacctctgggtatatatattatatagcctcctgctcagaccaaggcgggttagatagaaaccattttttacaagttg

SEQ ID NO: 461124 - DNA, 287 bp, Sorghum bicolor
cgtccgcccacgcgtccgccggcgcagtttccgacagagcttgcgacagccgcggagctctgcggggagctgtattgggagccgtccactgagctgagctttccatggatgttctcgaggattgtcgcacttataggcgctccgaccgcctgggctcgcacggttgcatatacatggaccatttcattgatccacttttttgggccaggtatgttcaagagcaatgtacagcttcataatatgcatgatatcgcttacaagacagcataccagattatgttcacgat

SEQ ID NO: 461125 - DNA, 398 bp, Sorghum bicolor
  unsure (1)..(398): unsure at all n locations
cgtccgcaaggttagggtttactcgtgaggcctcctgctccccctgccgtcgccgtcgtcgtcttcatgggacactccaacgtgtgggcccaacaataccgtgaagtaccaccttgaatgcagaggtctgtcncggtgtagcgcataactcctcacgggcttgatccggaaagcacggggctcatgtgctggcatgcagtgtctttcgcaagcatcgccaaggacatcgggcttcatcaagtactcgttaaagcttgaggagctccaaagcatgacataaatggaggcatggatgggaacctaaaaaatggatgtacttctaatataaaactatgtaatgaattggtttggccttgagtggatgaagttgttgtattcctcaattttcaatgctactt

SEQ ID NO: 461126 - DNA, 151 bp, Sorghum bicolor
cgtccgcgacgctgctgcagcggcggtggcggtcagcaaggcggctgctgtcaacgttgacaccggcgacggcgccgacgaggccgccgctgaagctgctgctgaggagaaagacaaggaggaggtccagccgaagccagccgccgacgtt

SEQ ID NO: 461127 - DNA, 191 bp, Sorghum bicolor
ttacgcgtacgggtctgcgccgtaggcggagaccccgtggaggacttcctcctcggcggcgccggcgacgacggggatctcgccatcttctgcgacggaggacttgggattgagggtgtcaatggagaagcttggggtttgccaatctaattaggaaaaggggagagatagccctcttattggtcaaatca

SEQ ID NO: 461128 - DNA, 145 bp, Sorghum bicolor
cgtccgtggatcggcacagcagcacaagatgtacccgagcgagtctttagaggcgtgcgtgcgtgcgtgtgtgtgtgctattgctacggcgtacggcgcagcattagcagcggcagtcatgagcactgggcgcgagagcaccacc

SEQ ID NO: 461129 - DNA, 376 bp, Sorghum bicolor
  unsure (1)..(376): unsure at all n locations
cgtccggcagcgtgtaaggcctaattntaaaggttgcattcaaaggactgggttatgacatgtgaagctctcaacaatgtttgtcaattgtcaatgtttcacaaggaaagattgcaggagctgctggagcctctagttccgcttatcgtgaaatctgtgaagattccaagaagcgctgtatgcaaaacagcactaatgacttgtactgacatctttaaggcctatggagacctaatggttgactccatcaatccactggtaatgcaaatgtttcaaaaggtataacaagttaagcgtttagatggtgaagctgcttgagcatgattaatatcaatgacaagtgtgattttccttttactactgataacaataatgt

SEQ ID NO: 461130 - DNA, 330 bp, Sorghum bicolor
cgtccgcaacaaggcgtatgcggatggagatgagaaaaagatcgctcaagtccttgctgcctacagtaaggcagctgatgaggtcattgcagccgctcctgctgacaagctcactatcatggagaagacgttcattgctgccgccgccactgggaactgaatcgttgattgatcggagtcgtccaccagtgtcatcaccgtgaccacttcctcgatatgatacatactacgaggcattaattgaggcaaaacctccgctctacccattgttcgatctcataactaggtttatccatgattttttatagacaaatattttttacacgcttt

SEQ ID NO: 461131 - DNA, 135 bp, Sorghum bicolor
cgtccgcccacgcgtacgattatatgcatcatggatgcttctgtctgcattgtaatgtgttcttttatcagaggcatagttgtattttaagttattgtagtaaactgagataggattatgattgggatgctttaa

SEQ ID NO: 461132 - DNA, 60 bp, Sorghum bicolor
atatttccaagcttactctcgcgtgcttccgtctttttatttagccaacctagagcgcga

SEQ ID NO: 461133 - DNA, 270 bp, Sorghum bicolor
  unsure (1)..(270): unsure at all n locations
ttttgactaagaaatgtgcagcacagaggacatatattacacaacattatatggtgcacaacaatggttggaaataagtaccaactactgaactgaaatggacaggatattaagtacatatgaagggtggaataacaaatagttcttcatgtcctacgagtagcatagtgctacttcattattacaaccaccatgcctggtagattaaagagaactaaagtctctggctgtgcnnagagagagagagagagagagagagagaaagggggg

SEQ ID NO: 461134 - DNA, 243 bp, Sorghum bicolor
cgacccacgcgtccgaaaaaaaaaaaaaaaaataaaacaataaaattagaaataaaaacaaaccaacaataaaagagaacaccaataaaacaaacattgatatggggagtccttttaataagaatactacggggcggcctttttatgggaaccacctttatttccgcgggcttccaacgaaataatttttttttagggccaccaaaatacaataatctgcccgccgttttaaaacacccattt

SEQ ID NO: 461135 - DNA, 279 bp, Sorghum bicolor
cgtccgaacatcgcggccgctcgtgtcctggctcgacaactagtgcgagatacaggagccgattcgttgacctgatccgtcacatgagccgcaccatctagatgaacgaactgaaggtctgactatacgtgggaggatgcaggggagttctgagtcggagaaagcgcttgcgagagtacaatctagtatctatcggattgtctgaaactatgatggtaactgttttgtatcgtgtatggtgtttgagcattggatggctcatataatggctgatatact

SEQ ID NO: 461136 - DNA, 82 bp, Sorghum bicolor
cgtccgaacacgcatacgatagttcaagatcgcagactggacgctctagaggatacaagctatcattacacattcataacgg

SEQ ID NO: 461137 - DNA, 239 bp, Sorghum bicolor
cgtccggcgcggcgtcgaccgctaacggggccgagccccggcggcgggcgcgggcgcgggcgcgggcggcggagcacagcgaggcgtccacctcgggtctgctggcgccgccgtcgcagccgcagcagcaagaaaggcaagggcaggaagcggagtcgtcgttcgggggcaagaagcgagggaacaaggtggcccctgagcccaaggagcttgaggagaggaccgtcgcgctcccgtcg

SEQ ID NO: 461138 - DNA, 116 bp, Sorghum bicolor
cgtccgaccacgcgtccgggacaaggaggaggagccggcggcaacggcggcggggcggacgctgtaaaggactgacgcttacctaccacgtgcgctgcataagtgatatcatttca

SEQ ID NO: 461139 - DNA, 360 bp, Sorghum bicolor
  unsure (1)..(360): unsure at all n locations
cgtccgagacgacaacgacgaagacgaagccccatgcagcatccaccggcaagccacccgaacctcctaggacgacgatgacgacggggaaaggggccaggtccatcccgccgtcaccgccaggcgccaccaccggcgcgcgcgagcatctacgacacgtgtgcgcgtgcgcgacgggttcggccccgtggtgtcggcggcggaggagcaagtgcgcagggggtncgcggtggtgaagcgctcccgggacccgtacgccgactcccggtcgtccatggtggagatgatcgtggggcggcagctgttcggcccgccggacatggagcacctgctgcgctcctacctnttcctcaacacgcc

SEQ ID NO: 461140 - DNA, 345 bp, Sorghum bicolor
cgtccggttaaactgctgttgttcccaaacgcacttaatttagatgttgattgcacatccttgtcagggctgtgctcgtcccttttacgggctctgtcacctctccagttctcatgatgaccattaacaaggtcggagaagcttaagttcccatagaacttacttcctccatcactaacagcatcttgctggggtctaacattactaacaccaacagaagtatttacagtaactggaccatttgacaggaattctgcacctctggaagcactcgctgagccattctcatatacaaccgatggcaccgaagacgtgctcgcttggttggctctacatcagacactg

SEQ ID NO: 461141 - DNA, 323 bp, Sorghum bicolor
cgcgtccgtataggtaaagtagaacacaagctaatgcctgactgacgtttgtgtacatgaattttgcatgggttacttgttgatgcctacctggtgtcctgaactcatgatgattcaagaatgtttggtgaataaaaaaaaaaaaaaaaaaaaaaaaaaaaaaaaaaaaaaaaaaaaaaaaataaaaaaaaaaaaaaaataaaaaaaaaaaaaaaaacttaatataattttccttctaaataaaaaaacataaaaataaataataaaaaatttaaataaatattaaatataatggggcggccgttttaaaaattcaacttttt

SEQ ID NO: 461142 - DNA, 502 bp, Sorghum bicolor
cgtccgcccacgcgtccgtccaaccaacactactgttccttcatggccaaagtacatgggcatgatactcaagaaataaagactctttttgctttaatctcagtgaaggtgacttggtcgatgttgcccattgcactggactgcctttattaggctgataactttctgtttctgttatgtaaaaagtgagtccaatagatcaactttactaaacataggtgtggtaaacttagactctgaactcatgtaataaggtagtattagtacactccagtaccagtcaatcagtcagtcagtcatatacattttattcggtccagcggccatggttgacactccgcagttgtttcacattttatttctgctctccattatttttatataggaatttcccaagcatatagagtggcttccctgcaactttggtggacaagaattagtagaacgtgtggcaacttctgtggatatgtatgaccaattttctgagtgaatgtttattctg

SEQ ID NO: 461143 - DNA, 526 bp, Sorghum bicolor
  unsure (1)..(526): unsure at all n locations
cgtccgcagactcgaattcgaatgagtttcatattcggcttgagggagtttatataccaccagaggttcacactcgttgcagtcgtccacacaatctgtatgttcagtttaatgcctaccaagtagagtctggttctctcttcctaccaaatagagtctggttctctcctcctaagagcatctccaagagattagccaaatttaccaatttagttattctctaaaatagatttgacaaaaaaaatactagtagagagcgaacgtccaaaagtcaaggtgggatcgagagttactgaatttagagagttatttacaaactgttgngaattttttttaataatagtcaaatttacctttngaaaaaatataattattaaatattttaatttatattnatttattatttatattaatttatattttatttatattatttaattttttattttttttttttttgtaattattttaatttttattttttaatttacttttattttaatttttttttattatttatattggg

SEQ ID NO: 461144 - DNA, 75 bp, Sorghum bicolor
cgtccgaaaaaaaaaaaaactaataaatataaccaataatgtaaagataggattgcacattcaatggacaacatg

SEQ ID NO: 461145 - DNA, 170 bp, Sorghum bicolor
cgtccggcatagcgtctaggactacttgcgtgcgtacgccggtgaccggtgccgatcccggtccgccttctcgcgccatggccgagatttgctgcgaggagattaagttgactcccccggcttctgttttttcatcactgtgcttgcctggggtctctctaaggtggata

SEQ ID NO: 461146 - DNA, 314 bp, Sorghum bicolor
cgtccggtgttgatgctacatacattttctgaggccatgattcataagcatccggtctccgcgatcactgatggggaccttgctatgcagagagcaatcaggttggtgtggccgaattcatcgcataggctctgcatatggcatattgagcagaacattgtgcgcaatgttaaagatgatgttgtgaaagatgaattcaagagtttcctttatgattgttggcccatacaagagactgagacaaaatggttgcaatttttggatacgcataacggtaccaataaggacgtatggtttgtgtataactctgatac

SEQ ID NO: 461147 - DNA, 293 bp, Sorghum bicolor
cgtccgggtgtcgtacgttgttttaacccacactcctactcttactgagagagtgagctgagacgagatgagagagttcgatcagtctgtgctgtgcccggcacagccgtcatgtgcgtccaccacggcgactcccttgtttttacgggagccgccctttgctgtgctgtgcttgccggggacgaagaggccgggctctaaaaaaacggaaagcctttttgctttcttggcccctggccctttggctacagacatctggcttctgctgccggtgcatgcgcaacaaggtgaag

SEQ ID NO: 461148 - DNA, 413 bp, Sorghum bicolor
  unsure (1)..(413): unsure at all n locations
cgtccgagcctcggccgtgccccaactgaccgcaatggcggaggcgctgctgctagcgtgccacctcgccctctctttcgccctcctcgccgcctccctctcccacctcctcgtcgtcgccgtctcccacctctcaccttcctccatccaccaccaccacctnctcctcctccctccgctgctcccgctcctcccgctcccgttcctccctcctccccacctcccgctgctccgcgcgctcctcctctccctgccgctcctcctgctcgcgcgcgcggccgacctcctcgccgcctcgttcccggcctcggacctccaggcgcacgcgctcgccgtcgcgcgccttctccttctcgccgcggcggcggctttcctcgcctcgtcgctctccgcctcggcgcccaggggcacga

SEQ ID NO: 461149 - DNA, 507 bp, Sorghum bicolor
cgtccgcttggcacctaatcagagtgcaggtactatgccgaatcgtgaagtgttgtcagacagacatagcgtcctcatcactgcgtccggattacaaactccagagttttcatttcctcgctcttcaattttatacctgcctttttgcctcgaggacggaccttccgagacactgcgacaatgcacttgtccaccctccagaaaattatttacacgagctagctgcgcaagatcacatccaggcgtacatacgcacgggctagctgcgcatgatccagccatccgagctagctgcgcgagatcagcagctgatctatggtgctcagcatcggtttcagaattcacatttattttttgtagatatataagctagccttttattttgaagataagagatattggtctgttctctgcacccctgtaataatgaaacacccggaaccagccgacaaagggaaagaatgagaaagactgaaacaaggatctttatggattcttcgatctatg

SEQ ID NO: 461150 - DNA, 333 bp, Sorghum bicolor
cgtccgcgccaggcgtccggcgagcggtcctttcccagctacatggcgagcacgacgtcgcacacgccgcagctagctgcacgatcttcgtcgtagctagcgtagcacagacagacgacgaccgacgagatggcgcgcggcggcggtgcggcggcgctggtggtggtggcggccttcgtcgtggtgctgtcggtgtcggcaggcgtggcccgcgcggacttcgccaaggaccgtgccatgtgcgcggacaagctgatgggcctggcgacgtgcctgacgttcgtgcagacaaggcgacggctcgcgcgccgacgcccgactgttgcgcggggc

SEQ ID NO: 461151 - DNA, 130 bp, Sorghum bicolor
cgtccggaaatatcttcatgtagccatattttcctaaacatgcacaaatggcttcgatgtcattcacatgtgtttgatttggatattactagctattacctgcattaaaaaaactgaccagcttgttgca

SEQ ID NO: 461152 - DNA, 420 bp, Sorghum bicolor
cgtccgctttttggcagggcaatgcttctctctatttaaccgcctaacatacatacatcagattaacagtgaagggatttcggggaggttaacacagcttgatggatgattgcttccaccaccctaatctgaaaagaagacaattctaccactgatgggagatagcaatgccttgaaggagctatttttttttcccctgatggtccgaatgatctcaagttgctacggtgctttggtaaagctggtagttatggctgtacctggagagcacatatactccggttgcgcatgtacatatatataacgtaacataatatggcaaggagtgtatgtcgttaggtagattgcgttttgtatcaatgtactgtgcgcacatgtggataccctttgagttctctccttgttttctatgggcattct

SEQ ID NO: 461153 - DNA, 353 bp, Sorghum bicolor
cgtccgggctttgctggccgggcgtcgcactctgacgtgccttatgtagatgccgccaggatttccctgttgaggtatattcagatggatagtaaccttcgggtgcatcatttccaacaaagcaagttaaggtgccgtgctcaaccatattagctgtgatcagatcgatgattactcttttaggcactctgtgatggcccttgggccgactggggacatatatatagcattaaacttaaacatatcattactgcagatgctcggatccttcgcgaagatccaattttgagcaatggggtgctgtctatctttgacattcaatcactttcacactttatttaatactatagggt

SEQ ID NO: 461154 - DNA, 449 bp, Sorghum bicolor
  unsure (1)..(449): unsure at all n locations
tcccggngactgaaacacatcgtcctcctattagagtcgaaccatctgctgtccctgttcaaggtctcacatttgacgggcagagcatcatggaatggtacaccgatggcatacctattctaccgacagtcagctgctcccatttggaatagcacaacatccatgtggcaagaatcaactcaagcaacttcactgccacaaaaatcgcaacagaatgagccaaatgaaatgggtgctaaaccagttgaaaatgcagaggaacaatttgtcacaggtcctccgagtgccagtgggaagcagctgtgtgttgaagttcctaaagatgatccacggcatatttctcctatgactggtgaaagtggaattagtaccatgctagacagcacttagatatactctgagcagcagtggctgtgatagcactttcaaccagttcactgcccctactg

SEQ ID NO: 461155 - DNA, 192 bp, Sorghum bicolor
  unsure (1)..(192): unsure at all n locations
cgtccgatcccgtcgccnncnnccaagctgaccgagaacaaccttgccgagctgagactctatctatcagatggcattgccaggatcatggggtctggctctggctacactccttgcgctgcgcaacagaactgctgctgcaggcatgttactgttgcatcatgatcgtgttacttgcgcacgaccgacgag

SEQ ID NO: 461156 - DNA, 497 bp, Sorghum bicolor
cgtccggtcaagaggacatccctgcactggtggactgtctgagcagggagaggctggtatcggcctcggctggccgagtccattccgtttctctcacgtcgaaaggtgaagtttggacctggggatcgggcaggaatggcaggctaggtctgggcagctccattgatgaggcggagccatgtcttgtagataccctggaaggggtggaagtcttgcaagttgcagcagggatggaccataatctcgtcctggtcgccgagtaggttggcatgttggttcactgaaagatactattattgttagttgtatgggggatcatgatctgtctgaagaaatggaagttgacgccattttttctttctcgaaggagtatggccagtaagggtgatgtgctttttttttctcaagagatggtgtggatgcgcattgccacttgctagacagcatgtgatctaacatactcccttttgtagcattggtcctcttgaaaagagatg

SEQ ID NO: 461157 - DNA, 247 bp, Sorghum bicolor
attagggatgtacatgccacagagagagagagagctatactgcattagttgaagaatatcaagatgaaaagacaagcagggacgtagatgaaccacgcttcacgtaatcacgttatactaacacaccaacgcacgcacgccgcagatacgcacactccgccgccgtcgttgacgtcgccggtgcggtgggggtgcacgagcttggtggcagctagtagctcattagtcggaccgcatgcggttgagc

SEQ ID NO: 461158 - DNA, 258 bp, Sorghum bicolor
cacgcgtccgctccgggacagacgggaaaacattacagccatgcatgctgtttcgccttgctttaacctttttgctcgtttctaccgaggaacagtagttccatcgggatcggaacgagctagcaacatggcttgtaactgaaacctgcaaatgttcttgatgaaatgaaaccgtcgcgtcatttgtttcacattaaacagatggggtaatagccgaaaagggaaaaaacgatctgaatataaaaaagggggaaaggg

SEQ ID NO: 461159 - DNA, 66 bp, Sorghum bicolor
ccgatgccggtcgtcgagctcgatcgagcggcgtctagaggatccaagcggcggcgcgttcaacga

SEQ ID NO: 461160 - DNA, 236 bp, Sorghum bicolor
agcattcgtggtaggctagatcgagagaggacacgacccgtcgcatcaacttttacctcactaacgatatcaccaacgatggaggtacaaagggggattacgtacacgtactcctttaaacttaaaatgacgctaccacgtacaccgacatataagctattcttcagacctaccacagatctttgcatggttgcaatcgatcccatgtctccaagcaaaccactactcttataaca

SEQ ID NO: 461161 - DNA, 275 bp, Sorghum bicolor
acgcgtccgcccacgcgtccggttttttatttttagtttttttttttattatatttaagtttacatacgcatgcatccgatttaaaagaaccaagattgcgtaacctaacatgaaaccactaaccttctttatacaacgacctgaatgcaaaaaacctggcgttacttaacaaaatcgcgacggagaacatcctggtgtttcccgatttaataatcttgaagaggatcgcacctttcgcacttggcaacaattgcaaaaggtgcatggcgaatgg

SEQ ID NO: 461162 - DNA, 341 bp, Sorghum bicolor
  unsure (1)..(341): unsure at all n locations
attcccgaatcgacccacgcgtccgcttcaaggagcggatgaggagcagcaccagcgcccggcccagcgccgacaggaggaggcgcaactggaccgccggccactattcggagtcggagcggccgtcctcggcctccgccgtcttcctgctcacggaatcctgacgccatcgttattcgtactgattgctcttctagctgagatctccaaaacgaattacactagtgttgcggaatgggatgtacatcgtgcgtgcggattgaatgaagcgacactggaatcaatttgttttaaaaaaaaaaaaaatnaataaatataattaattaatatattattatatt

SEQ ID NO: 461163 - DNA, 422 bp, Sorghum bicolor
attcccggtcgaccacgcgtccgcccacgcgttcgattttttattattatgttgcagccgtcgcagccgctgagaagcgacggcggcggcagaagcggcacggcgtcagtggcaggggctggcgcaggcatggaatcgaggcttgctcgctcgctcggcggaggctacaaactccgatccggcgtgtacttgaaccgatcgagaagacgaatgctgggagaaggggggcgtggaacgaagctcgctgcccggcccggcccgaccaccgagcgcgctgtcgtcgtctggccaagccgaccctagttttgatttttcctagttattgactagtcagcgtagctgcgttcttctcctttcggcgcccttctaatctcttctttcacttccctcctcgcgcgcggctgggaggaaggaaaggagac

SEQ ID NO: 461164 - DNA, 347 bp, Sorghum bicolor
cgtccgccatgacctaccttgccgcggatcccacggggtctgcaccatggcggtgttcggttggagcggctgcagtggtgagcgcgcatgggtggccgtggtatgcgcgagcacatgttgctacagccggcggcatgggcgcagacttctccacgcaagcactcctgaagacctggccgcgcctcttacttttcccatctggccctgcttgacatcaaccatggagaccgctttcttcatatggcggcgccccttacccccttcccaactggaggcgcacccccttcttcaacgaacatttttttacccaaccggcggatttattgcacaatgagtgtcctgttctt

SEQ ID NO: 461165 - DNA, 290 bp, Sorghum bicolor
cgtccgcacacctgctaacgcttccactactcgtcgttgctactagctgtcgtcacgtacgctatccagtgacactgctgttcgtccagcctgagcgctgagagatacgagtacgacactcgaatcgatcggtaaataataccaatggcggcggcgccggtgtcctcctctgccgcttccgcggcggacagcagggaggagatcgtcttcttggacgtggagaccattgcccttccgctcgtgctactagagttcagcactttggttgactactatagcatgactgatga

SEQ ID NO: 461166 - DNA, 267 bp, Sorghum bicolor
cgtccgctcacaacctgcacgagccggagtgcccgaccgacgtcgagcgagccatggaagagaccgaagctgctgtgaagctatgcactgaggagccggtgaggacagtgcgcgccgactgcggacccatcgagccgactcagcccatactgcctgcagctgcctgaccgtgaggtcgtggacttccagctagacgcgtgcttgcaaagacttcgcccggactggtgccaggcgtacgcgttctggggccgtgcaagcttacagctg

SEQ ID NO: 461167 - DNA, 226 bp, Sorghum bicolor
cgtccggtggagccggaccctgacgaccttctcttccccggccgcgaccgcgcggcgctctggtcggactcgtcctccgacggggagaggcccgaggtcgaggccaccgatccggtggagcgggccaaggaagaggacggcgtcacggtggcagccgcggctgatgggggcgagggggccgtggcgaaaggaggaggaagaccggtcccgtggtggaagctgtcgc

SEQ ID NO: 461168 - DNA, 330 bp, Sorghum bicolor
  unsure (1)..(330): unsure at all n locations
cgtccgcgcttcctgccgccgccggagtggcgaaagggcggcgaccccgaggaggacaggctcgacgaggaggcgctgcangagtacgtcagccggtgggccgacgacaaccgcgtcacctacagcgagaacctggtctgcggctccgacgagatggtgggcatcatccgcaagtccagcccggcgtcngacctgctgatcgtcggccggcgggccaacggccccaagtcaccgctcacggtcggcatctcggactggagcgagcacctggagctcggcgtnctcggggacctgctcacgtncacagactntggatgccaggtgtcaacg

SEQ ID NO: 461169 - DNA, 166 bp, Sorghum bicolor
cgtccgcccacgcgttcgtgtctctagcacactagtgagttctagactacacaggccatggtagccttggaggttaaggcataagagatcgggctgaggagctgcatcgaatcgatcgcgtagacctctatatagaagagaggctccaacgcgcagggcgacctca

SEQ ID NO: 461170 - DNA, 67 bp, Sorghum bicolor
tctagagatccagcttactacgcgtgcatgcacgtatacttttataggcacaaagcaattatgccgc

SEQ ID NO: 461171 - DNA, 450 bp, Sorghum bicolor
cgtccggatggagctgaggttgatgcataaagtttcgttgtatgccagagccaatgaagtcagcacatgttggggatgcatcctatttggtttgtacagcagaactttgcctagggttgggtgcattatatctgcatttgtttcaagaaaatgagtactagcatttcttctgctaaaacaagatgctgctgatagatacagtgggtggtttcccaacggtggaataaaaatccaagatgaaaggtgactggttatcagagagtaatgctctgaaaagggccatggtgtggatacaagctatacatatggaacctcagaagctaataatctatgcttttattgccttgtaaggacatgatgcagttcttgatttctggactaccgttgcatgtcttgattcttgggttgccgacaaaaggagaggggttcaggctgacagcaacgacaaga

SEQ ID NO: 461172 - DNA, 298 bp, Sorghum bicolor
cgtccggattgattagcatcctttccctacaaatatgctagacgctaagggaaagaccaaagtcttgacattggaagcagctgagaagagcgcatcggtagatccccagtgaaaggatccagatgcccaaaaggggggtgaattgggcttctctaaaaatttaagcaacctataagctccaattcaaccccttgtgcctagagtgacctaaagagctacccgataaaagttttgcaacctaattccaatcctattttagcaagacaattctaagaatgttaaaacacaaggtgaatgc

SEQ ID NO: 461173 - DNA, 330 bp, Sorghum bicolor
ccacgcgtccgcacctgcttgaggtccttctatagagcgtcgcttagtgctgtctcgattccacaaaagagatttaggctctatatcctaagtggtacacgctggacaactctttcaagagcgctggtgcttatactaacggctctggaattccaatcaagacttcaaacacataattgtaactcaatggctggcagatcgatacatttggcaggccagatggacactttgcattatacaacgtgccaggtggcagtcttctaaatgatgattcctcgatcgggtactttgtattcacacatgctgttcatatggaagctaggaatcctg

SEQ ID NO: 461174 - DNA, 415 bp, Sorghum bicolor
cgtccgcaaggaaattcactcactgaaggcccagttggaggcagcaaagtacgatgtcatcaagtactgcataggtaccattgtttcgatctcagccgtcggcctcgccgtcctccgcatcgtgatgtgaaggcagcacagcaagcaaatacgttctttcgtttacccatattcatcgtgcgtggaaacccgctagaagaggataggttctgattctgttcctagtttttagaggggacaagacgtgctcaagggggaaatgttgtaacacctggtagtagggggtgttgctcaaacttgtaaaatagatggcccgtggaagaaatgcatacagaaatgattctttacctgtgaatctgtgatcaggtgtaccttaacatgcggcttctccagccctgctgaagccacctatact

SEQ ID NO: 461175 - DNA, 188 bp, Sorghum bicolor
cgacccacgcgtccgaaagaaaaaaaatttaataaatacttaactgcgcgtccgctgtagcacgatctaaactaactgtctcatgcaataaccggccatacctttgacaggcggtgcgctaaccacggtcgacctgatgaccatcctcaactcgtggtactacgagaacattcgggtggccgtacttt

SEQ ID NO: 461176 - DNA, 107 bp, Sorghum bicolor
cgtccgcccacgcgtccgcacaaacctaacgcggagcggcgcgggccggccgccgggcgaggtgcgcgtagctgctgccatcgatcgtcgccgggtccatccaccat

SEQ ID NO: 461177 - DNA, 475 bp, Sorghum bicolor
  unsure (1)..(475): unsure at all n locations
cgtccgcccacgcgtccgatttgaagggcctgcaacagatccgttgcaacatgatttgtagcttctgaacagtcaggtgttatattcattgtgaagtttctacaagatcatgttgttgatgtattcaaagcagatgtaaaagggcatgcatatatgcagatgtggaaagccaagcttttgttttctgctgttcatcagtgagtcatctgaaccacaagttgcaggttgcatgaaacatcttcatagcaggaagcaaggaaagcgaatgaagtaactcgagggaactatagaccacacaggtcaagtccactaaatcaagttttattttgaagaccagtaatttggactgaatccactactccctggaaataagattttnttaatagaaaaaatatatgaactggtactgcttgtgccactgcattagttagacattactctttcaaacttcagagttcagacctactgcttacct

SEQ ID NO: 461178 - DNA, 300 bp, Sorghum bicolor
gaatgatccgtcgatgaagattccaacttacatgagcggacactctgtatacacccagcattacagggtcaccaactgtaagtgcaggatcagtcttgctacaaccaacacctggttgctacttttcatgatctactcactcgagatcgacgtcgtcgttccatacaccagcgtgaccacatcaccgagttactgtaagctgagcacacgttctcgttgtatttatttataaatccagtactgggagagcacaaaaccatagaccatcataaggtggcatagtttagacatatcacatat

SEQ ID NO: 461179 - DNA, 212 bp, Sorghum bicolor
cgtccgatcaattcctttcaatcaatgaagagatcaacaagcgagcactgcactgttgctactaggtagatgactacattggactgctactcctgcgagtgcttgctactagacggaggtcgcatagactacattcttcgtcattgactcatgctgcactaccctcaccatccaggatggcactgactgtaactacaccaaactatacgtca

SEQ ID NO: 461180 - DNA, 376 bp, Sorghum bicolor
cgttcggcctccctcgctcgcccgcacagaagaatagagaagccggctagcgcggagtcccaacacgccagcgccggtcatgtgggtggagactgagcggaactgcaccgagttctacgaggtcttcagtctcaactccatgacaccgcgctcacgcataccctcggactacagggctctgtccccggctccgctgacgtcgaagactccttgacctagtgctcgtcctacgacttgcccgacgtcgaccgcaagcgcgcctcctcctactccaacccataccgctcctccgcggtcggcgtttcctgcgacgctgcaccggcactcaacgcgcgggtagtggggtggccgtcggtgaggttgcaccgcaagaacg

SEQ ID NO: 461181 - DNA, 66 bp, Sorghum bicolor
cgtccgggcgctgtgggcggcgctcttgccatctcggagctgatgccggcgcagtacaagcacatg

SEQ ID NO: 461182 - DNA, 493 bp, Sorghum bicolor
cgtccgggaacgcggacacgggctccgtggccacggcggccgggcacccgcaccggcgggtggtggtcgtcaggaggcggaacaacgacctcgccgtcgaggagaaggagagctgcggctccaacgacgtctccgtcgtcagcttcgacggctcctccagcctcggtgccggtggcgcccgcagcggcgggctcagctgccataagccgccgggcagcagcaagagccggctcaagggcggccggagcttgccgcgccggaagcaggtggcgttttaggagcaccaccgctttcaggcaagatcacacaaggtgagcaagaaggtgcaccagcgagtggagcaggagccgcacagggaccgactcgacgccggcggtttcgaaccttccacggattactgaaacggacggacactgagcctggagtccacctgctttgtacatagatttggaagggatttgcagctgacgatttgttgttgggcttgcatgca

SEQ ID NO: 461183 - DNA, 314 bp, Sorghum bicolor
  unsure (1)..(314): unsure at all n locations
cgtccgaatacgtgtgctggccatgctgattgacacgaaagtttgtcatgagagtctagctagcttgcgaatgtggcaggcacaaactgacatgagaagcatcagcgattgatacgaatggtgatccagcagcatcctctgagagagttactgtctctaactaaagaaagncatctatcgattagctacagtgggtctggacgtctaggggactggaactgtggtgcgcacacatgtggtcgctcaagcattgtatgatatacatgacgcagttattgcatggcctttacatgctgatgtgagtatagattact

SEQ ID NO: 461184 - DNA, 80 bp, Sorghum bicolor
cgacccacgcgtccgcccacgcgttcgggaaataataaaaaaaatttaattttagttatatcagcctaactctttaaaat

SEQ ID NO: 461185 - DNA, 286 bp, Sorghum bicolor
  unsure (1)..(286): unsure at all n locations
cgtccgcaaatccccaatccccccgaaccctaacgaccactgagtcaccaccgttgccccgtgccgccgcgcggcagagcctcgacgccccgacgcgaaccatagcgactgccgagtcgctgccccgcgcgggcgagctccgacgccccaacgccgacgacgcgagaggcccgacacagggctgaggatcaggacttcacagagtggtagaagaagctcangcaagcggctgttgcttgctgggccaagcacagatttgagacaacatgcctaagataaagacaag

SEQ ID NO: 461186 - DNA, 59 bp, Sorghum bicolor
acatccttgcagtggtaacgaagccgaccgacgcttcaacgtgccagctgatggcgatg

SEQ ID NO: 461187 - DNA, 86 bp, Sorghum bicolor
gcagtaccgtccgggatcccggtcgacccacgcgtccgcccacgcgtccgaaaaaaaaaaaaaaaaaaaaaaaaaaaaaaaaagga

SEQ ID NO: 461188 - DNA, 228 bp, Sorghum bicolor
  unsure (1)..(228): unsure at all n locations
cgtccggcttccagaatatcctggaacggccgttccatgagcgtatgatcggccgccggcatgggctgcgctggatccactcccaaagtcgatgagaacagcaagaagttgaaaaagcctaacgctnggaagcatactcaaccaattacaccagcacaacttatacagatgcgtgatgaatcctgggacactgctccacactatggtggccaaaaagagattggggat

SEQ ID NO: 461189 - DNA, 98 bp, Sorghum bicolor
tactgcgcgtaccgcgactgaaaaccctgcgaccactaatcgctgagacatcccttcgcagtgggtatacaaaggccgaccgatcgccttccaacagt

SEQ ID NO: 461190 - DNA, 67 bp, Sorghum bicolor
cgtccgcgagctccggggccgtgctcggtgcagtgtcgccagccgttgtggcgcccgggagtggggt

SEQ ID NO: 461191 - DNA, 359 bp, Sorghum bicolor
cgtccggccaaaaaggttgatccaaggaatgctacagggtggttttggcaaacctttgttctagggatcttctctctcaggtatcttctcaagagagccagagggtgaatttgtgttgcttgattccaagttcggctccctggacattgtcatctttctcagttcgaacttaagatggctgcatcaccaatcactctgccactatggttttgctccactgttgctgtggctgctctcctcaaatgcgtatgctgcctagctcaaatcctaaggacatgatactggaaggagcgggaaaagggtcagacgagagggtcggatgtatcgtgggatttgattcattactacttcatgagaac

SEQ ID NO: 461192 - DNA, 244 bp, Sorghum bicolor
  unsure (1)..(244): unsure at all n locations
ccacgcgtccgcgagcggaaggtgggnngatagaanggcggatccagactctgatatcaccnaggaggaagacaagtggatgaaattcacatctcatgttatggcgtgatcccttatgatggcaaacatcgctccggaagtgttcagacaagcaaaccatcatgggcacattaagggattcactttcctaggaggcgtaaaggtcgagaactgctcctcaaacagggggggctggtgaggccta

SEQ ID NO: 461193 - DNA, 279 bp, Sorghum bicolor
ctcgcgttgctgctctcgagcggtgctatcggcagcgcggcgcggcagctgcaggagctgccgccgttgcccaagcctgagataccagcgaggccggacctgccgccgctccccaaacctgaggagcagccaccgttgcccaagccggagctgccggtgccaccgcagcccctcccgaagccggagctgccggtgccaccgcagccactccccgtaccgccgcagcccctgcccaaacccgagctgccggtgccaccggagccactcccaaagtcggag

SEQ ID NO: 461194 - DNA, 370 bp, Sorghum bicolor
cgtccgcgcacgcatacgacttgttgtacagacaatggccaccgtatcgactatggcaccaatgatgctcgcacatattatggaataggggaaagaggactgtcaccacgtccatatgggataggttccaggaagacaggttattacgcaaaggatcacaagtgctgacagaacatattcaataacaatataccagcagagcgctggataatctgcaaataccataagacctgaaagatcagtcttgcatggtttatcaaatacaggtggtggcattactgacattgtcggcgccccattcagatcaacttgctctatcctaaagacacctgaaaaatcttttccgtaagtgaatacaagttcgccacct

SEQ ID NO: 461195 - DNA, 243 bp, Sorghum bicolor
  unsure (1)..(243): unsure at all n locations
tcgaccacgcgtccggcgtgtgtgtgcagtgcagtgcctgatgcgcgcggcatacgcacacatgaatgngcttgcctaattgtttttttactcttcctttactctgtgcctggggctccttatgtttatgtatctgtaacatacacgtcaaccaatatagtgcgtgtgtatatgtcacatgttggtcacttataaacttgtgttgataaataaaaagtaatagacaccaatcattgtctttta

SEQ ID NO: 461196 - DNA, 349 bp, Sorghum bicolor
  unsure (1)..(349): unsure at all n locations
cgtccgcggacgcgtgggggacanctgtccttggtgacaaggagcagcttgtccatggaaccacagccaccatttgctcaccacaacctgtcggtggactaggaaccggatccttccttatttctcttgactgtggattgttccacacaaccatagtctcctctgatggagaggtgtggtgcttggtaatggagagaggtctcggactgtgcccacatgctatctttacggcagtagctgaacgggatgctttctattcaataagggtacaggctactgggacacacgcgttcacgtttcatggaacaccgcagatcttctgtgtacccgcacacacttctctacattc

SEQ ID NO: 461197 - DNA, 394 bp, Sorghum bicolor
cgtccgcccacgcgtccgcatttccctgggaatacatttaactggacaaaagctccaggatgtcgtaatccattgcaagagtgatgccaatgggatggatcctgaacatagggcgagtagaaagtgtgttccttcacaacatactatgcaagagctagagtagcgaggatgattgctccaaaaatcttgggaagagaaatttgttagataatatcatatctcctatggtctatctggtattcttgtatcagattgttgcctcaaaaagcagagacgccatggcgaccttgctgtgtattctaaattggtgctttggcaaaagtttgcctgatgtctctggggatgataaaacatttttgtaggagggaacaacctggcattttgatttttgagt

SEQ ID NO: 461198 - DNA, 336 bp, Sorghum bicolor
cgtccgtggaggatcacggcgagagatcggcctacgaacgtgtatatcatccccgatgacaagcatcaggcgaggctggcgtcaagttccttgatcttttcagatcagggagcggcggcgagatggtctcttcggataagatcagggagcggcgagatgctgcagagatcagtgatcatggtgctctctgttctatacaagctggaatgtgcagattgatcccatcatctcgttctggagacggcgtttgtctcatctgatggatcgcgtctgacttccttctggagacgggcgtttctctcatcttatggatcgatcgcacctgactttaaattt

SEQ ID NO: 461199 - DNA, 476 bp, Sorghum bicolor
  unsure (1)..(476): unsure at all n locations
cgtccgggccgcgcttttttttttttttttgtatgcatgtaatataataaccatacgaaaaacaaactgaagttgccaaaatgtgtaacccatcagtatgggtaactcgtaagctcacattttcgatgtttcgtcatcacaacaaaaacattactcacttataaacacccccaatttacactgccacagccacagccaccaagtagccccaaggattgataatccacggtccaccgtccacatattttagctccttacatgcaaagtgcacgaagctactgcatcatctgtgtggccttccacattcgaacacacacctgcatgcccttatcattgctcctcggcctcctcctcctcatcgtcctcttcgtcctccgaagaagacgacgagtcgtctgaatgatccgattctttgtctttcttcgggtctgggtcggcggcngcggctgcaggtggagcaacaagggccggtggat

SEQ ID NO: 461200 - DNA, 386 bp, Sorghum bicolor
cgacccacgcgtccgaaaaaaaaaaaaaaaaaaaaaaaaaataaataaaaaaaaaaaaaaaaaaaaattataaatggtcgccccttctaaaaagtaaccaatgatacgggcgcatacatactataataataactcatatttaatgggcgccgccaattcaattacaatccccgttacttttacacacccttggactggcaaaaactttttcatctcccaactcaaacccctttcgccagctgccgttttacccaacatgccttaataaaacccggctctcaccaaatttacttccctaacaataaatcccccttactggagaatgggacataccccaaagcccctcacctagctcctctcacaaggttggctccccctgaaagtcc

SEQ ID NO: 461201 - DNA, 169 bp, Sorghum bicolor
  unsure (1)..(169): unsure at all n locations
cgtccggctgtcgctncacaacaacccgcagagccagcccacgctcgtgccggagctagcgctcccgacncaccccctgctacacaagctgggcgcgcacactggcgcgcgcattgagctggaggtcgagaagcacgctgagcatcacggcggcgctcgctatgcctgc

SEQ ID NO: 461202 - DNA, 295 bp, Sorghum bicolor
ccggtccgaattcccggctacccccaccaccaccatccccggcggtccgcgtagcgcgcgcagatggcgacggcggccacggcgtccgcgacggcggcgacccgcttcacgctcctagcgggcgcggggctccgcagccgcatcagccgccgccccaccgccgtgcggttccagcgccagcgggggctcaccaccaccgcgctactgaagaccgccgacctcctgcccaaggcgcagggccagcccgagacgctcgactaccgcgtcttcctcgtcgacggcgggggccggaagg

SEQ ID NO: 461203 - DNA, 204 bp, Sorghum bicolor
attcccggtcgaccacgcgtccggtactagatactgaacataccattctctagtagcaaagattgactgcgcatcgatccgactcagtggcatcctgcacgtgctgcctagctgtactgcaacgtccacccatctacaacttggcgactgataaaacagcgatgatcgcgacacaagagtgcatggcgctcatggatttttgga

SEQ ID NO: 461204 - DNA, 182 bp, Sorghum bicolor
  unsure (1)..(182): unsure at all n locations
cgtccgggttaagggaggagacaaaaacacatacatttccatcgatccgcagcagctanctagctactagtagcgatggcatccaacaactgcagtggtgtgggtgcgcttctgctgtccgtagccatggcactcgtgttgatcacggctactacttcagtgcgcgctcatgcaccggtccc

SEQ ID NO: 461205 - DNA, 283 bp, Sorghum bicolor
  unsure (1)..(283): unsure at all n locations
tcatccgtccttgaccggtcgcctagggaccgangcgtcggcgtcgactagctggaggcgnggctgctccggcatgtcgnctcccggctggacgccgtcgggcggagggagatggcccggcactacagggacctcaacggagccaacacgctgctcgaattcttcgcagactagagctagggggcaacttggttttgtagggttgtaagcttcaaactcctttctgcttaatgaaatacacgcttcggattgtgttaaaaaaataaatccgaaacttacaatg

SEQ ID NO: 461206 - DNA, 296 bp, Sorghum bicolor
cgtccggaacatagagacgaggcatacgttctagacgagccaagagtacgtgcaccagcatgccactttatggacttgtgcatcgggctacctagctgaaatgcaagggccgtgattccacgacgctgcgactgataaaactgcatcgctagcataacaagtatgcatgacactcatggaatgttcgatagctgacatagctgcgaataggcatgatatgatcagccgttcgaacagtggcgcatgctgaatggcgacatgcacacgcgctgtagctgggcatctagcgcaccaga

SEQ ID NO: 461207 - DNA, 421 bp, Sorghum bicolor
cgtccgccgtgcccttccgctgcaacccgcaagcctgctgcatccctcgcaaggatcgacatggccgcctctggtggtggtgctgctgctgctctgcgcggcctcgtcgtcgtcctcgccgtcctctccgtcttcgtgtggggtgcggaggccaagctcaacgtcaaggagacgtgctcgttcacggcgcacccggagctgtgccagagtgccatgaccaagctggtgggcccggacgacgcgccggcgcctgcgccggggaagtcggactgagatcgattagctcatacgctgcacccctttacgatatataatattgtgctgtgactttggtgtcgtccttgtgattgatcgtccaggacgccgccgccaatgtcctcaagaaatagctcttgagtgatttatcaacacgttcatgttt

SEQ ID NO: 461208 - DNA, 241 bp, Sorghum bicolor
  unsure (1)..(241): unsure at all n locations
aatactgtttatgtttgtcctgtcttctaatactaattcaaattttatatacttttncgggggggccccttttttgagtttcaattttttcatccccttctttgaaaaaaatttttttttttttatggggcccaaaataaaaatacctgccccggggttaaaaaactttggattggaaaaaccctggttttcccaacattaaaactttttgaaaaaaatcccttttttgcagtgtgggtat

SEQ ID NO: 461209 - DNA, 350 bp, Sorghum bicolor
cgtccggccggcaggagcagatcgagatcgacgaggcgagggagcagcggctgaagcagacggggcgcgccgagcagcagcggcagcggcagcagaagcagaacccccagaggatccccatctgggcgtggtgatgctgatgctgagaaaatttttgggcgccgggaaacgtacgaacgaacctagtaggatttagcttcacctcaagaacaagaagaacaccaagcaagggcggcgatggtgcgtgcggatcgccgccggctggacggaggagaaggccacggcacaggcctgctgcgtcttttactccgttgattgatcggatcctcttgatctccgaaagatggaga

SEQ ID NO: 461210 - DNA, 322 bp, Sorghum bicolor
  unsure (1)..(322): unsure at all n locations
cgtccggcaaagcccacagcagagaggcaaacagcagagagttgcaacaaaaagttcgttcagctcctagcctcctaccttctgtgcgttgctctgcgaggaggaggaggaggaggaggaggaggaaggaaaggttgatttgatcgagcagcatggcgccgctgccacagccgtggggccaccaggtgctcacgcttcttctgctcgtcgtcgccgcggcgaccgccgcngctgtcctggtgagagcccaccactagaagtgcaacaacccgtgccggaacccctgccgcgagccgtgccttttctcaagcccttcaccacc

SEQ ID NO: 461211 - DNA, 77 bp, Sorghum bicolor
  unsure (1)..(77): unsure at all n locations
cccattgaaaaaaaaaaaaaataaatnnnttattaattttattttaaaaataatataatattaaatggggaaggggg

SEQ ID NO: 461212 - DNA, 267 bp, Sorghum bicolor
cgagcgtccactctagaggactccatatctcacggacgcgagcatacactttgatccacaaatatggtgtatgaaataacaagagggggagtatgagggggaggacagctcttgctactcaggctaccattactgggcacagctgaatttctgtggatgacatggccacataacacagatgggaactgactgataatctcctacacaccagtgctaaccagctgtcgcgcatatcgactgtccagatgacaagagcgacttaacgaa

SEQ ID NO: 461213 - DNA, 149 bp, Sorghum bicolor
cgtccgccaaatccgtctcggaccctctccctcgtcgctctacgacatggctgacccgacgccgtcgcagtcgccggcgcagacaccgtccccgccgtcggcgcagcaagctgccgcggcgggcggacgcgaggacatgctggcgtgcg

SEQ ID NO: 461214 - DNA, 368 bp, Sorghum bicolor
cgtccggcttgaggcgaggggcgcccgcttacaagatacaaagttaacttcccgtgccatccatgtccttagtgcgttataagctggaccaaactggagtgcagggtggccacgtgtctcaactcgcggactcgcaaaatccttggcgttcctaacttaagacgggctacatacattccaccattaccatgttacctacatgatcagaggccacgaccgcttcgacgttaccaccactgcccacactggaatgccaatcgggtgctaccttgtacggaccattaaagtctggaacgttagtaagccgccccacgtgtaccgatcacttgccagggccctgtcggcccgtcctttcgcttatctacctt

SEQ ID NO: 461215 - DNA, 304 bp, Sorghum bicolor
  unsure (1)..(304): unsure at all n locations
cgtccgctcgaattcgactcggaccctctgccttagaggtatacagacatggctgacccgacctcgtagcatatatctgcncaaacaccgcacccgacgtcagtgcagcangctgccgtggcggacggacgcgaggacatgcatggctgtgtccgtggccggacgcttagatggccgttgctgctagattgcctttcgcgcgcgagctccataccgaagaccgctgcatcgagtgctcttaccaaaatgatgttaagaggcatgcgaggtattacatggaggctgtcaagaaactacagtctta

SEQ ID NO: 461216 - DNA, 150 bp, Sorghum bicolor
gattccggtcaccacgctccgcggggagggggatgtatgggcctctttcggtgcagagaggctaagcttacgaacggaggcttgctacgctatgtggtatatatagcggccagggagtgtaatgaagcgtccggcatttgactacaacgc

SEQ ID NO: 461217 - DNA, 111 bp, Sorghum bicolor
cgtccggtttgtatatggactaaaatcgcattaatgtaatatccactgcaaacattactgagttcctcgcttcctacttttttgcaattggaaacatagcttgtgcttttc

SEQ ID NO: 461218 - DNA, 96 bp, Sorghum bicolor
  unsure (1)..(96): unsure at all n locations
cgtccgaaaaataggaagataaannncaatctaactaattttatataaaaataacaattnnaaagcgatggttgtttgtntatatataaataattg

SEQ ID NO: 461219 - DNA, 296 bp, Sorghum bicolor
  unsure (1)..(296): unsure at all n locations
cgtccgcatccncctctatcagcaccaataatcccaatagcaaccacgtctcgatctccattaccaaagaaaatgaagatcgtggtggtgctcttcgtgttggtcctcgcactcatcgctggagccgctgccgacaagaaggagaaagaagacacttgcaaaaatctctgtgcagaaaagaagctcaaggagccagcctgcaaggagtcctgcgccctcaacaagcgcttcaaaaaggtgtggatcgaggctgtccaatgctcgttgaaatgcaacaagaagcacggctttggcac

SEQ ID NO: 461220 - DNA, 193 bp, Sorghum bicolor
ctagtctccgtctctcatcaccatggcattccccgggtctccggcgaggaagctcctaccaggcggcttcaccgccggcgcgggcgggtctctcagcttcgacctcgacggcgccggcgacttcttctcgggcctgtggcagctcgtcaaggcgaaggccgccgaggtcgtggcctacctcgccaccctgttc

SEQ ID NO: 461221 - DNA, 53 bp, Sorghum bicolor
  unsure (1)..(53): unsure at all n locations
cgtccgcccacgcgtccgaaaaaaaaaaaaaaaaaaatatatntnttttttnt

SEQ ID NO: 461222 - DNA, 409 bp, Sorghum bicolor
  unsure (1)..(409): unsure at all n locations
cgtccgcccacgcgtccggttgtacatgtattatgtctactaactttgctcacttttaaagaataatttgatcataatgaaagatatgcaaaataatgaaggtcgtacaccttttgaagacttgacaaacaccatcaattgtggtggccagtcaacatcaaattcacgagaacaaattgataaacgtgtgcaacgtaaaagggaaagagaaaaagcacgaagtgcatcaatgactcaagaacanagagatgataaaaataaaaacttaaggaaaagtatcatcaaaaaaggctaaaaaaatgcatacttgggacgatttatcagaaaaaaccatgtaaacctgggttaatgaattcaatatggtcatttttaagttaatttaatttatacttgaagtatatgttaaaaa

SEQ ID NO: 461223 - DNA, 126 bp, Sorghum bicolor
  unsure (1)..(126): unsure at all n locations
cgtccggccgctgctgctcactcccgacgcacgaagctcccattcccaagagcaatccatggcgtccaccaccctctnctncgccttcaccctcctctctcgccccttcaccttccctttccccac

SEQ ID NO: 461224 - DNA, 121 bp, Sorghum bicolor
cacgctccctgtagcggttcattgcgcgcggtgtgtgtgtacttacacccagaccgatccattcactagcgagctacctagcgctcgtttcgtttgctttctttcctttctttctaggcac

SEQ ID NO: 461225 - DNA, 92 bp, Sorghum bicolor
cgtccgcaaaaaaataattatagatctctatctataattattactcacactcccataaataaatataaaataaaaattactataaaattaaa

SEQ ID NO: 461226 - DNA, 187 bp, Sorghum bicolor
cgtccgtgagtgtataagttgcgaatgcaaccgtgaactagattgtgtttaagcacatgctgatggtttcccgggctacaagctgggtagagttggttgggaattgtcgctgagatttgagtcactgttatggaattcttgatcataacatcatgatagttaatgcatggtactgtcgttgataaaa

SEQ ID NO: 461227 - DNA, 530 bp, Sorghum bicolor
cgtccgcggacgcgtgggttgaaagctgtcatgcagaccgatgggtttgattatttgcagcaaagctgcccatccctcctgactgagcttctcgagtatgtggccaaggtaggagatcactccgtgagcccctgcttgtattcaactgaagttcttgatggtggcgatgccaatggacgacgtgtgaaaccgaggatctaacggctgcccagatgagcctagaagaggagttccttgtgtcctttttcgttgtaaagtgattccaatgacgggtgcttctgtggcgccataatcatgcatgttgtagcgtgggtttgtgtgtgtgtgtgtggtgacttccatccctctccccagccatattgctgctactgtggagggagctgtggctaatatatatcctactgactagtgtattgcattgctgctgcaaagcaacttgtcatcataagtgcacacaggtggcatatggcaaggatggtctggtacaaaggtttgatcaaggagaaataatggcgcaaaatttgttttgc

SEQ ID NO: 461228 - DNA, 494 bp, Sorghum bicolor
  unsure (1)..(494): unsure at all n locations
gacccacgcgtccggngctgggatctcaagggctgaccagtattatgcttcctaccctgctggtactgagctactgactgacactgcaaagctttacaaggctgcattaggcaattgttttgaaatagacgaatggggcccaatagagttctccatcatggcgaagcattttgaccggcaagggaaaccaccatatgcctaccatgcacaatatctggcgcacctcctctcccatgggcagctcgacggaagcggttaaatgcaggatgtgttgttcatagcatgcatcaatgcgattagaatgccactagatcttgtacaaaaatgttgccttgctagaacactgaggccagactgtatcagactagagattgcagaactggcatcagaaacaggttctgaattttcggccatcagctggtacgatatcggtgccgaatttgtaggttcgcgcaacaatttctgaaaaaacatgacattgtcctgttggagca

SEQ ID NO: 461229 - DNA, 173 bp, Sorghum bicolor
cgtccggtagctagatagagttatagctgctgtcgtcatcgtcggcggctgctgaagcgacgtaacctgttcttagaggataagataggctagcagagagggtcatatagcgaggatgtaggttgagatcagcaggcgtatgacgaggatgaggcaggagatatcatgcgcca

SEQ ID NO: 461230 - DNA, 445 bp, Sorghum bicolor
cgtccgctggctttgtattagatcaggagcagacttctcaatcacagactgaacctacaactggagaagtgtcaaatttgacacgttttaaaaagaattttgtctcacttataggtgtttgctatccatggattcatgcaactaatgaaggtctctcatttgcataccagctcttgtatctgttggatgctactggattttatagtccagcactgcatgtgcttgggcttcatgtttgtcgtgctactggacaagagctgatggaatcatcttctaggatatcaaggattagaaatcgtgaacttgagagactttgtggtcctccatggttcaaggctgtgcaacgagtgtttcttagttgtgtgtacacaactctagattatgcacaaaccggtttaattgctgcagtcttctttttcaagatgatggagtggggtatcaatct

SEQ ID NO: 461231 - DNA, 401 bp, Sorghum bicolor
cgtccgccaccatgaagcacctcgtcctcccctcccctctccctctcctcctccaccgccccaccaagtcccatctcctccaccctcgccgccgcctcgtctccatccggaacgccgcatccggcggcagctccggcgaacccacccctgccgcggatacggccaccgggacgtctccgccggccggtgccactgccaagcccgccggcgtcaaggaccgcctgaaggcgaggaaccagtcccgccgggtccagctggactccccaccgccggaggtggtggggtgccgaagaggaagcccgccgcgtcgtcgtcgtcgtcgtcgtcgtcccctgcgccgaaaaggaaggagaggcggaaggagtgggaggggatgagcgtgggcgagaaggccgcggagc

SEQ ID NO: 461232 - DNA, 55 bp, Sorghum bicolor
  unsure (1)..(55): unsure at all n locations
tcgacccactcgtacgcgtncgaccacgcgtacgaagactcaaaaaggacaaaaa

SEQ ID NO: 461233 - DNA, 385 bp, Sorghum bicolor
cgtccgcaatatcgcattgtaacccaagaagccggtggaagaacttgtgaaactgcaaaaaaaaaaaaaaaaaaaaaaaaaaaaaaaaaaaaaaaaaaaaaaaaaaaaaaaaaaaaaaaaaaaaaaaaaaaaaaaaaaaaaaaaaaaaaaaaaaaaaaaaaaaaaaggggggggggttataaaaaataaaaaaataaaaaacaaaaaaataaaaaagggggggggttttttaagggaaacaaattttaattcccctggcggggggttaaaaacttttttattgggaaaacaattgattttcccaggtgaatgttttaaaaagaaatgtttgtaaaaaaagttgggttaaaaaaaaaaaaggccttaaaaaaaatcctttttaaaa

SEQ ID NO: 461234 - DNA, 376 bp, Sorghum bicolor
acggcggcggcgggcaagatgcgcagggcgctcaacagctcgcaagagctgactgactacatcctggtgctcgaggacgagttctgcgagacgctcgcctacctgagcataccgagctttcaccgactgctcctgtcggaccacgccggatgagtgccatggtggatgcccgacgcctagcgcccagtggggaaggtcttccccggcgacaagggtttcaagccggacgtgactgtggccaaagacggtagcgggtacttcaagaccatcaacgctgcgctggccaaagcgccggcgaagagcgccttcatttacgtcatgttcttgaagggcggcacgttcagggagtacgtgttcggttccccggacgtgacct

SEQ ID NO: 461235 - DNA, 193 bp, Sorghum bicolor
cccggtcgaccccgcgtccgaaaaaaaaaaaaaaaaaataaaaaaaaaaaaaaaaaaggaaaaaaaataaaaaaaataaaaaaaaaaaaaaaaaataaaataaaaaaaaaagaggtgtaatttaatagtggtttaaagtttgtggggtgtttagtctttcttccgcttttttgtcagggtaatggcttttttt

SEQ ID NO: 461236 - DNA, 451 bp, Sorghum bicolor
cgtccgaaaaaaaaaaaaaaaaaaaaaaaaaataaaaaaaaaaaaaaaaaaaaaaaaaaaaaaaaaaaaaaaaaaaaataaaaaaaaaaaaaaaaaaaaaaaaaaataaataaaaaaaaaaaaaaaaaaaaaaaaaaaaaaaggggggggcggttttagggaattaattttttcttccgggtttttccgattatttatttttttttatggggacctgattttaatttattggccgggcttttaaaagggttgtgtggggaaaaacttgggctttcccaattttaatggatttagaacaattccccttttggctatgtggataattaacaaaagggtttacaccaatcctttttccaaaaatttggccacctttattggtttttgggccccccctttagggggtcctttaaggcggggggtgggggggtttacccacaggttgacattttta

SEQ ID NO: 461237 - DNA, 172 bp, Sorghum bicolor
cgtacgctcgatcaaagcccacgccgagaacaccaaccacacaaaaaagggaaaaacgccgcgacgagccgacgagctctactttccacttccggccttgggcgaccgtgacgagcgactacgaccacaggaacgatggccgtttcctgcctctgacaccgacacctggttc

SEQ ID NO: 461238 - DNA, 237 bp, Sorghum bicolor
  unsure (1)..(237): unsure at all n locations
cgtacgtgttaatgaaactcaactcatagactcaggctgacacggtcagttgcaagttacaagtagcccgtccctggcacgcacgcacacagcgtgaaccaccaccacaaggctggcatggtgatgaacgggctgtccatcagcgtgtacgcgccggagacggtgggttgcgcggtggtggacgcgtcgggcgcctgcgcggcggccacgtncacgggcgggctcatgaacaagatg

SEQ ID NO: 461239 - DNA, 422 bp, Sorghum bicolor
cgtccgaagaagagaaggcacaggagggacagcacatcatcagcatcttctgaatctgagtctgcatcggacagtgattctgatgacaagggcagccggaggaagagtaaaaaaaggggtggtaggcgctgagttaatgagctggacaaagcagtgtggatgttcaatatatcattatatgcttctgttcaattcatcatcagaccatgtgctgggcttctccaacccaagaaacaaatgtagtatttgctttcctgaatgctagtactactgatatttttccctgtacgaagaagcacttgggagctttaggtgttcctattctatgattgctttaggtgttcctattctatgatctttgtgtgaaccattgaatcctgtaacgatatattcacctatgaatttctaaagtttggtgtgtt

SEQ ID NO: 461240 - DNA, 343 bp, Sorghum bicolor
cgtccgatttctcagaccagtggaagggcgttgtccaacaaaaggagcttggcaaatactgtaacggtgactgcctgtgttaccgaggatccacagcatgacagcagtcttgctgccattttggacgacctttcgtactcagcgagcttgagccggatggttctgcacagagctgttcaatgttgcatatcggtttatgtcatgcgatatgtttactgcccatcacggtccatttttcagacctgccttcctgtttcttttagctaccaaagaaaaagaagcaggtagttccgtagttctttagtcacttggttattttctagcgtaggctggcagttgcttc

SEQ ID NO: 461241 - DNA, 135 bp, Sorghum bicolor
  unsure (1)..(135): unsure at all n locations
cgcgtccggatgatataagagcagaaacccgtgaacatcgacagttgagtcaaagtccttcgttgtagaacaatgtgtcaccaagaccatagaagaactgcagtatactgcagctagtgtttctgnnnatgatgc

SEQ ID NO: 461242 - DNA, 363 bp, Sorghum bicolor
  unsure (1)..(363): unsure at all n locations
cgtccggaccataatcatgcatcttgactcgtgtgctagtcgtgctaccagcggatgcatgtcaccactatatatgtagagggacgcttgatcatctcctaggttcagcgataggaccggcagtagcttggagaggaatgagaacgacttggttattcggccaccgaggcttagtgtttctgccggagggggggggcagacagatcaccaaagcatgtagaactagtttcaaatggtcataatagcggtcaaaatgaccaggtacgacatctactgagtctactggagaaagaatatnattgttgaatctatctacgctctgtcggtacgattgttataatgggggttttgactgttttttat

SEQ ID NO: 461243 - DNA, 397 bp, Sorghum bicolor
taacatatatatattgttctcattttacaagcagataatgaagtctacagagggcaaatgagaacaatatatatatgttaaaacgagagacaagagggggcggatagccaggtaacaaacattgcaacatcatgatgtagcatgtttacttacatactccataccaccaagagaagggtagaaccaaacgctgttccacttccccgatcaggatcggatgcttggtcctctgccggagttggtgaagaaaggcgacagagtgcggtacggaacaacaagttaccaagatttcttgaagcaatacttcactgcaaagctggatggaaggaagctcatagagagtttcaagttagagtagtagcaactacgactctgtctaattatcattgcagatgga

SEQ ID NO: 461244 - DNA, 99 bp, Sorghum bicolor
cccgtccgaaaaattaaaaaaaaaaaaaaaaaaaaaaaaaaaaaaaaaaaaaaaaaaaaaaaaaaaaaaaaaaaaaaaaaaaaataaaaaaaaggggcg

SEQ ID NO: 461245 - DNA, 395 bp, Sorghum bicolor
cgtccgcatgatgccgcgcaggggttaccccgtgtgggacctcatccgcgaggaccccgcgcgggtgcaggcggaggtgcacccgtgggccgacggcgccgacctggaggagacgctgctgcgcctcgtcgggagggcgctcgtggaggaggccgcgctgccgccgccgctcgactgcaagctcgagtccaccatgcccgttgccgcgcaggacggcggcatgcccatcatgccgctcggcgtcaagaactgatgccgtcttgtctctggttgagaatctgatattattgccggttcgggttcgttgtgagagctcgagcaagtgcgggcgaggcacggcgtacgatacgatggattaatagtagcggttgttaactgtattattgactaatttt

SEQ ID NO: 461246 - DNA, 64 bp, Sorghum bicolor
cccggggcgacccacagccttcggatctttctaggtcttattaatgggagggggggatcataat

SEQ ID NO: 461247 - DNA, 292 bp, Sorghum bicolor
  unsure (1)..(292): unsure at all n locations
cgtccgctttttttttttttttacacaaaccgccaagtagacttcttcaatattctattagttatagtactattacatatatactagtaattatatacatgacatttacaccgtaccatgcatgcatgcgaagtgctaggtcatcgtgcatgcatggtgatgactgatgatgcatatgccacacgggggtgcatcactctacctctcttcttcttcgngagagatagcgcgcgcgcgtgtattactactatatgcatgcgtgtgtgtgtgtgacntgtctatactctatata

SEQ ID NO: 461248 - DNA, 373 bp, Sorghum bicolor
cgtccgatgctttcttgcatttgtttacactgcaattgtggcaatattgaaatcttatccgtcggctggagattcagctctgtatcttggtcttctgggtttatttgtcaatgaattagcagaaatgcagttcacattcttcttgtttttcggatatattggagtctccctacttagccctgtcatgcataatctgtggatctggaggggcactggtaatgcaaatttctacttcgccactggtttggcttatacttgccttcagactgtgttgctggtagagagtgtaagttcaatgataaagcacgacagaaagctaaggttacttgttacaagctaacttggtacatcagacaattcaaaagctcaagtg

SEQ ID NO: 461249 - DNA, 389 bp, Sorghum bicolor
tgcgtccgtggcggagacccattccttggggggggagggggggaataaatccatcagcaaatctcatacgttggacctggggatcacactggtgtccatatggctgaagattatatctatggacatcatgagcgtagacgctgaccatatttggttggagaggtggaggttagtaccccctaactggagagaggagagtgggtccacctactacgtggactgtgagtactctcgtccagagcctgagagaccttatccctcaaacatgaggaagattccgatccctttcagggctgcggagaagaagaggagtagcacgtccgaagctgctctgctcatgcatgctcatttgggccgataactgggctggctcagagagcacaggacac

SEQ ID NO: 461250 - DNA, 297 bp, Sorghum bicolor
cgtccgtgagaaacaagagagccagagccaggccagcgcttgctgcaaagctcaagcgccgcagcaatgtctctggccccgtccatcccttccatcaaggtgaaggtgggggccgtctcggtcgcgccgccgcaccgcgcatgccggtccttcgcggtgatcaggagctccaaggcggagggacccatccggagacctgcggcgcctccgctgtcgccgccgccaccgaagccacccaagacgccggctctgtccactcctcccaccctgtcgcagcctccgacgccggggaagccc

SEQ ID NO: 461251 - DNA, 69 bp, Sorghum bicolor
acgcgtccgccccgcgtccgttttttttttttgtgtttttatttatttttatatttttagcggtctttt

SEQ ID NO: 461252 - DNA, 120 bp, Sorghum bicolor
ccctatcatcctcctcacctgaaaaactacctgatgagaatattgcacctttgcagcaaggtgtttcaaacaacttatacttatgctgtctgcggtttattttttctgcatggagaatcc

SEQ ID NO: 461253 - DNA, 489 bp, Sorghum bicolor
tgcgtccgatagtgtaaaaatgtgtgtgtgccttgccctactatttaaacaaatacataaattattgatcttgatttcatgtttttaaatgccaacttaaattgcactcaatggtgtcaatttcctttgatgccatgtttgttaagcaaaactaaaaatgctccttgtgtaatgtgtatctcggttctcttggagctattttggtagtaccattaatattttggttctattttcatttagttaatacttcggctctttaggaatggcaattttgtgtcgttgaagtatcatatatagctgaacattactccatacagaatgctatccccttatttttggtcaaaaagttttagaatgtttcttgaacactcatgattatgcctgtaggttacaaattggttgaggttaaagatcgatctaatggattggcgtacttatggtcatggtcgatgttgtttgaagacaagcaaataaacttaagatcatatc

SEQ ID NO: 461254 - DNA, 63 bp, Sorghum bicolor
cgtccggactatattaagggggtctttgggggtgggggcttatttctacaaatacaatacaaa

SEQ ID NO: 461255 - DNA, 225 bp, Sorghum bicolor
tccggggagagttgacgacaatatatctgggagcgagatccctgtgcaaaaactccagagtactcatcgacattgaagaaaatatttccaaaactcgagcaaatcgattcagatatcatagcatgaaagctagctaatcattgcacagatactaaggcgaagtaaggcttggggtcttgcgggggggtggctaacttccatccccaaaactccagagttctcatc

SEQ ID NO: 461256 - DNA, 328 bp, Sorghum bicolor
  unsure (1)..(328): unsure at all n locations
cgtccgctcccgcttcaggtatggtggcggcactggtggacgtggtgaccgctttggaggatcagatcgttttgctcgctatgatgatgatcgatatgatggtggccgctatgtagacagcagggatacttactatggtgctgggcgtgatcgttatgctagtgatcgctatgcgccagcagcagaccgctattctggtgacaggtacagtggtgcagatcgttatgcgtccagtggctttgccagagaaaggagctatgagagagatggagggaggtccaatggagggtactaccgngatgatccgaggggcactggtggctatggc

SEQ ID NO: 461257 - DNA, 238 bp, Sorghum bicolor
  unsure (1)..(238): unsure at all n locations
cgtccggcacgctccgcgacgcgatggccgcgctccgcctcgcctccttcaccctccgacccgccgccgccgccgcggcgtccgcctcctccggcgcgacccccgcggcgccccggtccgcctccttcgcccgcgcggcgcgggggctaccctccctccgcctggccccgccccgccgccgcggggacctcgtcaggccccgcgccgaggcagcggcggatagctancgcgccgcgct

SEQ ID NO: 461258 - DNA, 400 bp, Sorghum bicolor
  unsure (1)..(400): unsure at all n locations
cgcgtccgcccacgcgtccgccaggttcctgggcgacctcctccattccggccctctcgtccttccatctccggcccgttcctcgtcggcgcacgagcacccaaggtccccggactgcgttcacctctgctctcctttttcttctcctgttcgacaactgtggcgtccgccgctgacgccgtaagctaggtgcccaggtcttcgccggcgacgagcacccgccactccaccaggggatgccccgggcttaattgaatgggctctcttctcaccaggactggcgcatggctccaggccaagatttttgatcccgtgctgnaggtaatnagaaggggagcagaacccaaggaactggccttntnttgtggccttggngnaacaattgggatctttccaatat

SEQ ID NO: 461259 - DNA, 461 bp, Sorghum bicolor
  unsure (1)..(461): unsure at all n locations
cgtccgatgggaggacatggagcgatgttagtcattggtgatgaaaaacaaacaaacaaaaatccactgatcggtgccgctgctctcgttgcatccgggtcgcaggacaagtcaatcgggcactggcgtttcagctgcgtcatgtcgttcccgtggaggcctatcctgtcagcaaccgggtgcgcggaatactacttcgatgctgagtcagggaaggtgtgcaggcacgtcgaaaattggaacgttcccaagatggcgctccttcggcagattttcaggccgagccgatgggtctgggagaagcgctaaagcctgcacgggccaggttttttttttcggtgcatgatcatcagcatccttatgctccaaaccaaatgcatgtgcgtgtacgtanattcgtaaaacacantaggaaggacacagtatattaaaatatggggttggccatggacttggcccac

SEQ ID NO: 461260 - DNA, 424 bp, Sorghum bicolor
  unsure (1)..(424): unsure at all n locations
cgtccggcgagctccttgatacaatgaatgccctaaagaacttggggctaaatgtcgttaaagctagtgtctgtctcgattctactggcaagcataacaagttttctataactaaagcgtccactggccgtaaaattgatgatccagagttgttagaagcaattcgactgacgatcattaacaacatgttagtgtatcatccggagtccagcagtcaattggctatgggagcaacttttgggccagaagcccctacagaagaggttgatgtggacatagcaacccacatagatatctatgatggccctgaaagaagcttacttgtggtggaaacagcggaacgtccggggttgctggttgacccttgtaagatcatctcanacctcaacattaatgtccaatctggagaggttgatactgaggg

SEQ ID NO: 461261 - DNA, 188 bp, Sorghum bicolor
  unsure (1)..(188): unsure at all n locations
ctgcagaacccgtccgnnatcccggtcgaccccgcgtccgagnagcccacttcttcggctgatttctcccgtcgacaacgtgcgtgcacgtacggccatatgtatgtatatgtgcgtgtatatgtatgttgtacacgtatatgtatctncgngtgcgtgtgatgagagtgagatngagagnatgagag

SEQ ID NO: 461262 - DNA, 638 bp, Sorghum bicolor
  unsure (1)..(638): unsure at all n locations
cggtccgggatcccggtcgccccgcgtccgcccgcgtccggctagaaaatcaggtagtgaggccacgtcacccactggtcacccttgtgtgaccagaaaaagcatgtcgaaggatgacgtgacggcggaggcggaggccgcggcgaaggcgccgtactgggatccgccgccggcgccgctgcnggncncttttcttgctggggggggggggggntnctnntctttcntntttttgttttttttttttttgttgtgtggttttttcgttttttttctgttttgttttttttttttttttttttnttttttttttttcttttttttttttttttttttttttttttttttttttttttttgttttttttnttttnntttttttttttttttttttttttttnctttttttttcctttttttttttttttttttttttctcttttttttttttttttttccttcttnnttttttttgttttttctggtttttctttttttttnttntttgttttttttnnttttttgtttgtttttttttttttgtgttttttttttttctttttttttttttgtttcgctttttntttttgtccttttttttttttttcttttctcttgttttctttttttttttttttt

SEQ ID NO: 461263 - DNA, 55 bp, Sorghum bicolor
cgtccgcttttgttttgacacggaaaagagaaggttaccatccagtagcagtttc

SEQ ID NO: 461264 - DNA, 502 bp, Sorghum bicolor
cgtccgatattcctgagcttaaccctgaagtggatgtttatcgcataggaacccttatggaacttgtaagagaactttctctatcctttgctgacgatggaaaacgtgtcaagtcacttgatagcaggtctgtgttcaaggctccatggggcaaggtgcatttgctggcatcccactccaactggcaggaatcagaaaaattttggaattcatggactggggtgactatggggcaaagggcaccttcattaatattggggcactaggtgctagtgaggttgacaaagaagatgatatgtttgtcctcattgctccgcaaaatgctgttggaaactgcataattgatgatatgagagctatgactgatgctgctggtgacaggcctgtgattcttataaatcctcgcctaaaggatatgcctggatcaagtggtgtgatgcaaaccatgggaagggatattagggctgagtatgcttgatcattccagacggggctttcttcc

SEQ ID NO: 461265 - DNA, 450 bp, Sorghum bicolor
cgtccgcggagcgccaccatctcaagcaaagcagcaggagctgaatactgttggccgtaagcagcgtttccggaacaagctgaaggaagcagataggaaattcactggcagtgctcaggagaacaaggtggagagcctaagggagctcatgggtgctagagcaagtggtaccagcatgccaaagagctcccctcgtgattggctcgacccgcactgccacgaatcagaatttgacagataaccaactaggtgactggcaaatgatgcggcgtttacctaaaggttgatacactgtaatactggtgcaggtgttattcgccaataatagatactaatagatgaaacaaaacaaaagggtttcctgtggtgtaatatccgagctctgctattctccatgtcgcttaaatacccttagttccaattgtgcgtgtgttgttggatttgtgattt

SEQ ID NO: 461266 - DNA, 172 bp, Sorghum bicolor
  unsure (1)..(172): unsure at all n locations
cgtccgnattccgggtcgcccagcgtccgcccacctaccctgcagccattgctctcctctcgccgtctcgcgtcgtgcagagccagctcccacgattgactccaccgcgaccggggaggctgagagagagagagagacgcccgcctccagatcggctggcggggatggcggc

SEQ ID NO: 461267 - DNA, 283 bp, Sorghum bicolor
  unsure (1)..(283): unsure at all n locations
cgtccgccttatatgttttgatccctggacccatgttgacatgtgtatagttgcactagcctactgtcacagtgctaatgctttaaaatatagtggtcaagagaatcgtagattctctaaggtagtataaaaaatgttaagatttaaattatatggagttttagaagacaggcatgttctaacagggtcttcatatgctctcatccttttttatgtaaatttctttcccatagttatatatgtggngctatctctgntgnggngctatctttgttccanatat

SEQ ID NO: 461268 - DNA, 342 bp, Sorghum bicolor
  unsure (1)..(342): unsure at all n locations
cgtccgatgcgagagtatacctgccttgctcgcacactcttaagctctctcgcaaggcatcgcactatgcactattggcctatttccattatgtaggactacttgggtcaaacgaggtgaggtaggtggcccaggccagtctgtaatgatgcatctgttgaggcatcacaaattgcatgaattttggattattcagagggaatgttacatatgtacactggagcttgaagaggatcagttaccttatgatggctaagctttttgatgttctcaagagctgagtcatcacatagtctattctgtccagtttgcanggaaattattaaatgtaatacatgtata

SEQ ID NO: 461269 - DNA, 354 bp, Sorghum bicolor
  unsure (1)..(354): unsure at all n locations
ctgagggagcgagcgctggacatggcgtcactgtctgtcgccgccgtggcggcaaccacggcgaggccaagcagcagcggtgggagagggcgccgtcgtctcagggtcgcctccatggccacccagaaggggcagaagccgacgacggccaagaccgtgtccggcacgacgagaagatcgcagggcacgacgacgacgacggtgttcccggtgggcgagccgggcccgcgggcggcggggacgacgacgacgaagaaggcggcgccggcggtgaagctgctgacgaacgtggagaagctgcggctgctgacgaaggcggagcgcgcgggcctgctgtnggnggcggagcgcgcg

SEQ ID NO: 461270 - DNA, 412 bp, Sorghum bicolor
  unsure (1)..(412): unsure at all n locations
agcgtccgcccagaaaacctcctagatccaatccaatccacacgtcagctcgtgacgatcatcagcagccatgtccggcgacgcggcgccgcacgtcgtggaggacttcttcggggccgtccagctcctcagcgacggcaccgtcgtccgcggcgacgaggcgcttctgatgccggcggagccgttcccggacgttccgggggttgagtggaaggacgccgtgtacgacacggcacgcggcctcaaggtccgcctgtacaggccggcggcagcagacgccggctacagatgtagcaacataaaactgacggggcaggggcacttgcatagatgtggataggaaataatttgtaaaaccattttaaaagattgaaaggcccnncttatntgttaantgaatggnngntttgag

SEQ ID NO: 461271 - DNA, 324 bp, Sorghum bicolor
cgtccgctgtagactacctcaactccaggtatggagccagcgcttctgatgactactatactgatgatgaggatgatggcgaagaggaactggtcgagcaagaagccgaagaaggcaccacagcagaagctgcttaagatgcaactgaagagggcgaggcagacaacagttcctaggtgggaagtgtagatttgttgtttcttatttgctatgttacccttgggtgagagtgatgttggtaattcttccctaacgggccttttgtctgctttattataagttgataatggtctcttaccaaagcgtatgtttacaaatacatta

SEQ ID NO: 461272 - DNA, 597 bp, Sorghum bicolor
  unsure (1)..(597): unsure at all n locations
acaacgagctagcatagcactccatccaatataacaatgaataattgtgtatttgccggtcctgatgaccgatcgcgatcgataaatcataagcagaagaactagaatagcttgatgtgtttctgcatgcatgtatctacgggggggaaagggatgtgcagtacgtgtgtggtggctacactacactagtaccacatcaagtacgcgctagctagctagttcattcgcccacatgtatggatggatcgatcttgctttgatgagctagctagctgaggccattttgctttgttcttgtgagatcagcctgacttgagtgtagcaatggcatagacctgcgtaatagactctgaggcgggnactgcattgcatgacattctacatcccacaaaaagggggatgtgcagcaacccgtgtgtggngggcttaccactaacactnnagtaccacatnnaaggtacgccgcctagcttaagctaggttcaatttcgcctcacattggtatgggatggggatcggatctnntgcttnggaatgaggctaagcttagcttgaggggccattttggctttggttctttggggagatcaaggcctg

SEQ ID NO: 461273 - DNA, 165 bp, Sorghum bicolor
cgtccgattcccggtcgcccacgcgtccgtggccccgagacccacgtaactacccggctgcagagctcgcggctcgcgcactgaccaggcaggagtagcccatgcccgcgatggcggcgccaccgtgctggcgcgcgcgtgcgccgccgtccggtgggaccgggc

SEQ ID NO: 461274 - DNA, 500 bp, Sorghum bicolor
cgtccgcccacgcgtccgcaagaagactgtgggactctcagagggagatgatactgcaaggaacgctgtgacaactgaaagagacatagacgctagtactaccgaaagcaacaatgtgccagaaccaaatgaaactggaataacagaccaagggagtgtagcagagaagatagcggaatcacctgatgtcgacgttaacacaagcagccatgaagatacagaggagaaggcaaaggaattgccagattcagatgtgacaaatacaatcggccaagttgatgcagtggagaagccagagggaacaccaaacgcagttgtaaagaacaggagaagcattgaagatgccgttgagccaaaggaaacacctcaggtagtagatgggaaagatacatgtgaacctgaaggtgcaacagtgaagccagaagaagcagcagatgccatagaattaaagaacacaaccagtcatgaagatgctaagcaaccaaaggaaatacggaatg

SEQ ID NO: 461275 - DNA, 385 bp, Sorghum bicolor
ccgtccgggtgccgccgagaaggacaaaaagaagccggcggcggggcggagctggggatccccctgggcgggtggccgtcgtacaacccgcacaacttcagccagctcgtccctgccgacccctccgcgcagccctcgaatgtcacaccagccacttatgttgcgacccacaggacagacccgccacccaatcaagtgataacaacggaggccaggaacatcctgctgaggcacttctaccagaaatctgaggagaagctgaggccaaagagagctgctccggacaacctcgctccggagaacaacaacaagcagcccaggggacctgtgggcgacgtcgggggccagtcaagcgcaagaggctgaagccacacagctggtgctg

SEQ ID NO: 461276 - DNA, 288 bp, Sorghum bicolor
  unsure (1)..(288): unsure at all n locations
ccgtccggatcccggtcgaccacncgtccggagcagccaaagatcaagtggttgggcgcgaacattggataaccatattggttgtgtgagggaacataactgcagttataaatagcacatgacttaaagacagttgcaaaaggtgcatacataaaaaaatactggcagcagcctagggggggagaagaaagaccgtgcagacagaactctgaaataccactttaagcttgtgaagaaaagtcagattgccctgcaagaaagaacagctgaatcatttggggtttatta

SEQ ID NO: 461277 - DNA, 387 bp, Sorghum bicolor
cgtccgcgccggccgtgagctagctacctggcagtctgcacacctggagagtactctaagatcgagctagctaggcggcggccatggcgtccatggacttcgtggtccaggtccttgttcgagtggtgatgagaagaagcatccgcaggctgcaagaggtcgttgacatggccgtggagatcggcacggcggtcttcgtggccgtgcgggtctccggcctggtcttccgccgccggctgccgacgagtacgccgtcgtcttcgtcgtcgccggcggtctcgggcggcactgcaactactactacgacgtattactactccccgggagcgtccgccttgatcggcatgtccaggattgacaggcactagctagctagggtcagctagc

SEQ ID NO: 461278 - DNA, 220 bp, Sorghum bicolor
cgtccgaactgtacctactgcatctcctccacgcgccgttggagttggagtcgcactctcctttccctcaatcgcgcccaggcctagtggtgccgtagagcgtgagggcagttctactggcgttgtagatattgcccaagccttgttgcccttatcctactttgttttttttttactatggggggggggccaaatgaagcagctgctttttttttttgga

SEQ ID NO: 461279 - DNA, 314 bp, Sorghum bicolor
  unsure (1)..(314): unsure at all n locations
cgtccgattgcttgaatcaaatggcatataatcatcacagtttttcgccgatgtgatttttgggcctatcgaagtagatgccatgtctgttattattagttctttgttcttttcccgtggtgctggactattgtctgaactcaaacaaaagcagtagatgatgcggtgtatatagataagcctatggatattctaagatattttgcactagtaaaagttacccgccattcattttatcttttattgtataggctcataccatttctaaatgatgtgcangcaaaaagggtactaccagtactggtgggtggagc

SEQ ID NO: 461280 - DNA, 450 bp, Sorghum bicolor
cgtccgcggacgcgtgggctgcagcagtggatctagtggagaatattaactgagcaagttcagatagttagagacaacagcacagacgtcatgctatatcgcatcgctcttgcggttattcaggtcatgcttgactttcaagcagctgagaggcaaagacttgaggagccggcttctgatgtgggggtggaatctctatgtgcattgattaacaataacctgcgttgctacgaactttcatcagagttaagtagcagtacattggaggcacttccacaaaactatgctgaacaggttaattttgaggacacttgcaaaggatttctagaggttgccaaggaggctgtcctccaaactgttagtgttatttttgaagacccaggtgtgcaggatctactcgtgaagctttaccagaaagactggctggagggaatggtcacagaatatctt

SEQ ID NO: 461281 - DNA, 321 bp, Sorghum bicolor
  unsure (1)..(321): unsure at all n locations
cgtccggaagattaatggtttcacaactttacatcaatttcctttttagctacattttgtctcctccaaatatcatataccacatgatatgttactagctacatatactctttttaaatttcctaatcattagataacaactccatagcacatgaatactgcaatcagtccccaatcattgtggcatatatgtcaaacagtcaactactcaaaagatacatgggacaaatgcatgctcatatagttttcttgtgctgagtatcggtaatgttgtgcaggaagactacaataactggaattactggaaggggccgntgccag

SEQ ID NO: 461282 - DNA, 118 bp, Sorghum bicolor
tcgcccagcgtccggtaattctagagctaatactgcaacaaacccgattccggaggggcgcatttattagataaaaggctgaccggctctgtcgtgatcgagattatgaaacttgacg

SEQ ID NO: 461283 - DNA, 127 bp, Sorghum bicolor
cgtccgcagcaaagcacccacaccagcgaaaaagcaagcagcgatggcggcctccatgatctcgccgtcagctctggtggcgccgccgtccagggcgcagggcctgccgtccctcggccgccgcgcc

SEQ ID NO: 461284 - DNA, 232 bp, Sorghum bicolor
  unsure (1)..(232): unsure at all n locations
gtccgnatcccggtcgcccacgcgtccgctgcagcatgttgaagactatgtggacacaacctattatcgactacactgtttcaacgttatggcactgattgctgagagatgtgagtaacactgaggccttgccaccaagctagagattagtctgcataatgatgaggtgaagcattcagggattgctgtggtaggggtgattactaagtcaccaaattnaagaccatttaag

SEQ ID NO: 461285 - DNA, 169 bp, Sorghum bicolor
cgtccgctccatgaggccaaaactgatggtcgggagggagaggaagcagtgaagtctgaggttgaggatgatgatgagcaggatggcaatgaggatgaaaatgagtaaatagtaggatggggaacagcagctttgcaattgggtgtttggttgttgagtaggatttttt

SEQ ID NO: 461286 - DNA, 461 bp, Sorghum bicolor
  unsure (1)..(461): unsure at all n locations
cgtccgcagtcctcctcgcagacagagcaccgcgcccgcgtcaggagagaggagaggagaggactaggaggagcctggaggccgtcggcgctgatggtggcgtggtggcggaggaaggtgctgccccgcgcgcgccgcgcctgggccgccgtcgccgcgcggctccgcgcgcgtaagcctggatttcacctggacaccatgagatcaggcagtggtggtattctgaagctccacgaggacgtgcagacttgcggctacaaggacgtccaggtcatgttcgacatgttgacatcggaactcgaggctgctgctcaagcccagaaggcaccgccgtcgccgccccgcaaacaggcgctaccgnctgcgtggcccggccggtccacgatcgccgttgcgcannanatcctggcaaacagtgttattacagaaacgtncgncccctgcccttttttcntnnttgg

SEQ ID NO: 461287 - DNA, 283 bp, Sorghum bicolor
  unsure (1)..(283): unsure at all n locations
ttttattgaaccattcagagcatttcattaaagctactgttaaggaatactccgtacacgtggagtagaataatacatacacaaggtcagcttggcagacaagcccaagcaaacttcacagagacataagatgtgatcccttgcacaaaatgtagaacgggggggccagcaaccatgactagtcntnnaactcatgctaaacagttgtntngccttaaaaaatacattactaatcattacaaggggccctttaaaacctaatggagagggggggcctaagggg

SEQ ID NO: 461288 - DNA, 362 bp, Sorghum bicolor
ctgcgtccggatcttccttgatgctggaattgacgtaccgggcatcagcgaatgagcagtatcattttcctccattattggcagggtagatgctgacatcctgagacccaaactgaagaagttgaattctttccaagatgcagcaaagcatatcaaagtcctactcagatggcctcaccgcaaatcaaagagatcaggcagcggccagaaggatctggatgatgatgcctcgtccgtggactctgccaagacctggagccatgaagagactccgacaccactgagacaaaggtattccaggatcagctccttgttcaacaagcggacctatgcgggcaagactttacctagagaagcaatgc

SEQ ID NO: 461289 - DNA, 76 bp, Sorghum bicolor
gtccgaagagctctgttaaatctagcattgctcgtggacctgggattcgcgatggttattaacgctgattcctcag

SEQ ID NO: 461290 - DNA, 122 bp, Sorghum bicolor
cgtccgcgtagagatagtaccggcttggtgtgtgtgtgtttgctgtcatctcgacgacgacggtcatggcgaaggcgcaggtggcggcggcgaggttcatgacggaggtggcgccgccgccg

SEQ ID NO: 461291 - DNA, 160 bp, Sorghum bicolor
cgtccggatcccggtcgccccgcgtccgacggctccggtgccaaccccgaacgtgtccgggggacctggtgatcaacaccggaagacgcatactgcgacacggacgcgggttcgcaggcgcgcggccgtgatgggtctgtggctggacggccgtggtcgg

SEQ ID NO: 461292 - DNA, 428 bp, Sorghum bicolor
  unsure (1)..(428): unsure at all n locations
gtcgaccccgcgtccgcccacgcgtccgcccacgcgtcctcaagatacagtgcaaacaactgaaagtggatatggccgcactgatccaacaaagcagcagcaagagcagctcccacatcagaagaacctcctcatccactcagctctagctcagccctcagcactgcatgccctgctgggtccttgcattgggcgcgggcgtgccaatctcatggcagatagatcaagatgtaccacaaccaaattacaattctagtactagaaaatatattatgtgtgtattctacactagtagtaccaattaaggatcgtaattcgtaagcaaacctttgacctncgacgatcctgctggtaagtactaatgcttgcgctctgcaactcctaatagtactatagctggctattcctaggtgcaatagaataggagg

SEQ ID NO: 461293 - DNA, 379 bp, Sorghum bicolor
  unsure (1)..(379): unsure at all n locations
gcgtccgcggacgcgtgggcggacgcgtgggctccactcccacccgcctgcctccgcgtccgcctgcaccgggcgggccccctcccatcgccatgcctccggccgccgccgccgccgccttcctcttcccggccgtcgctgtcccctgccgcgtgcttcctcaacggcgggcgaggagcctcgccgtccgcgccgtcgcctcccctccagcctccacggtcaagcccgccccggcgccctccaagactgggaagtgggagtggaaattcnagaataagccggtaaacatatactatgaggaacatgagcaggaggttgctgagaatgtgaagaacattatcatgatccctacgatctctgatgttagcacaaaggagga

SEQ ID NO: 461294 - DNA, 189 bp, Sorghum bicolor
cgtccggccgcccgcgccgcctcggcgcgtgggccggggcgcgcgacgccgcgcccagcgcctccgtgccaagaacaccggcgcaggagaggaggaggaggaggccgaggcggaggacgtctggcgtgggctgcagcagcagcagcgggagcgggaacgggaggcgtgtttttttcggggggggggggg

SEQ ID NO: 461295 - DNA, 308 bp, Sorghum bicolor
  unsure (1)..(308): unsure at all n locations
cgtccgatccgcagcttctgcaagaagcccgatggtaatggaatccttggcttcgagaaccccgaccctgatgatacctggcaactctgcatctggcagaccgacactgtcattcctgttggccgctggctgtgctggatcgactactaccgtggcatcctcttctgcgatgtgttcggagatcccacccctactgtttccttcctccgcttccctcttgacgagtttcctatccggggcaaaccatccagctggctgtatcgnggcgcgtccgacgtcgggggcagaaagctcaagttngttgacat

SEQ ID NO: 461296 - DNA, 531 bp, Sorghum bicolor
  unsure (1)..(531): unsure at all n locations
tgcgtccgcccatgctgtccgaaaaaaaaaaaaaaaaaaaaaaaaaaaaaaaaaaaaaaaaaaaaaaaaaaaaaaaaaaaaaaaaataaaaaaaaaatggaatgaaattataaaaatttttttttttaaaaaaataaatataaaaaaaataaaattttttttttaaaaaaaataattaaaaatacggggggggggtttttttaattttaattttttgtaacccttgtttttgaaagttttttttttttttttggggcatccatttttattttttggggggtttttttaaaagggcgtggttggtaaaatttttggttttcccaattttttttgtttgggggaatttccttttttggggggggggttttaaggagaggggggtgctcttttccccttttataaaattttntttncttttttgggaaaggggcccccctttttttnnnaatttttaggggggggggggtgtgttttttccanaattttattttttttttggggngggcttttgnntttttttttttttttttt

SEQ ID NO: 461297 - DNA, 190 bp, Sorghum bicolor
  unsure (1)..(190): unsure at all n locations
cgtccgcccacgcgtccgcggacgcgtgggttttttttttttttttttttattatttttatatttttatttttttttttatattattaaattttaaatattattaaattttaaaaaataaatatttaataaaaaaaaaaaaattnaaataaatnnnnnannaaaaatttttttaaaannanngggggggg

SEQ ID NO: 461298 - DNA, 172 bp, Sorghum bicolor
tgcgtccgctgttttttgctgaccacagcgagggggggggtgatataaggaatcacgatgagaaccgccatgtgtaccttgttagtggagattaagggagagagatgcagaataggagtcatatttccatacagagacgctgtaagattgtgcgcatcatctcatatacaca

SEQ ID NO: 461299 - DNA, 128 bp, Sorghum bicolor
  unsure (1)..(128): unsure at all n locations
cgtccgagcaatgcacccacaccagcgaaaaagcaagcagcgatggcggcctccatgatctcgccgtcagctctggtggcnnccccgcntnntcccccgcgcccgcggcggcgctcctgtgctcgccc

SEQ ID NO: 461300 - DNA, 353 bp, Sorghum bicolor
  unsure (1)..(353): unsure at all n locations
gcgtccgcggactcgtgggcggacgcgtgnggtagtgggtgccccacacctaactcttaccacttgtgatggatagcaagatcaacaaaattgaggagatctatctccactccctgcccgtcaaggatccccagatcattttagacccttttcccggggcttaaggattattttataaagagggggggggggggtaaacccttatcccccctttctttacacccttttctatttctttttcttttctttcttttttatcttttatttttttttttctttttttttctttttttttttttttttttttttttttcttttttttttatctttctttttttttttttttttttttt

SEQ ID NO: 461301 - DNA, 149 bp, Sorghum bicolor
  unsure (1)..(149): unsure at all n locations
cntncgccttatttgttttnatccctttacccatnttnacatttttatanttncactancctactntcacantnctaatnctttaaaatatannnntcaaaaaaatcntanattctttaanntantataaaaaatnttaaaatttaaat

SEQ ID NO: 461302 - DNA, 407 bp, Sorghum bicolor
cgtccgaaagaattcaaaatactatgtcattgtgtgggagtataatgcacgccttaatgctgaaaacatcaagaacttcctgtatgaactaaatgagaagcaaatacccaaaaagagatttaacatgaggttggcaccagaagaggagtcgcacaaacttactgggtttgtgcataacgctgtcacttgcattgggatggaaacaaacataccggttatcatagacgaagctatcaccaaattggatgaggatttcttctggctgggcggtggagaagttgacctcaagctcgggatgcgaacctcacaattcttaagtgcctttagtccattcgtggtgaaatgcagctgaatctggtgatagtcggacaacctaagagaagcttctgattcattttatttctacc

SEQ ID NO: 461303 - DNA, 484 bp, Sorghum bicolor
cgtccgcaaattagaaggaaacctgccagttcggatctgatatgccgaattcagcagtagatacacataaacccacgctcctgatctctcaccattaacctgaatctgcagcccaggagactgaactgtacgcttctcacgacaacaggttgctaatgtaatggctgctataaagcgaaaagggggggtatgagcaaaaatctgttgaatcgatccagattttgtgaagcagatatgtgctcagctagaagtactagaagcaaagcagaaaggggacaaaactgaagagcgtggtgttgagctaatttgggctgacgggactgttccctgggccaccaccgggatctgctctgcccccgcgcgcctgaggctacatattcagacatgcctgcactccatgggatttccaccggtgggcagatcagcatgggaaggagatcgaaggagggggggagctaaacggaggggttcacatcgttagctc

SEQ ID NO: 461304 - DNA, 255 bp, Sorghum bicolor
cgtccgtgttagagcacacaaagttgtttgccgttttcttttcaggcgtttgctgtgtttgccgtgtcatgtacacagaattgccaccaaattgtgttttcacagtgctaccggtatcgcaatcatgtagtagtggactctaatccccgcagtctttcccatgttccatatgataatggtagggggggggagtacgcgtgagaaatgtgtggaggagatatgacatcacgacttaaatatctgtacattccaaaa

SEQ ID NO: 461305 - DNA, 326 bp, Sorghum bicolor
  unsure (1)..(326): unsure at all n locations
cgtccgatttccctttgttcagagctgcaatcgaccttccattgatacccttatgacctgcagacttgcgcatggatgttagagatatgagtatgtttcctgacgagtcgtttgattgtgcaattgataaaggtactctggactcattgatggtaagtaggtaacataagtcaccgtgtccctttgcttatttctggacttcttcaacaatgccgtcttgctgctttcatagtgtggtgtggatgctcctctcagngcagctcanatgattctggaagtggacaggcttnttaaaccaggaggagtctttattttggtaacatatg

SEQ ID NO: 461306 - DNA, 93 bp, Sorghum bicolor
cgcgtccgcccacgcgtccgcccacgcgtccggggaaaaagaaaaaaaaaaaaaaaaaaaaaaaaaaaaaagggcgggaaggtttagaggatc

SEQ ID NO: 461307 - DNA, 235 bp, Sorghum bicolor
cggagttagtgaatagaggtgttgcctaataagttgggccactttggtcaaaccacggaccagccgcatcggcaagttgctagcccttgggtcagaaaatcatgatggtgaaaaatgggcaaagcacaggagaatccttaatcctgcctctcactactacaaaacaaagtctgggccgccagcattatctaccctccgtattgcaactattattggattttagaattcagttcct

SEQ ID NO: 461308 - DNA, 381 bp, Sorghum bicolor
  unsure (1)..(381): unsure at all n locations
cgtccggtaattcacatgtctttgtgctgtatatatctcaagttttgtccccaaaaaaaaaaaaaaaaaaaaaaaaaaaaaaaaaaaaaaaaaaaaaaaaaaaaaaaaaaaaaaaaaaaaaaaaaaaaaaaaaaaaaaaaaaaaaaaaaaaaaaaaaaaaaaaaaaaaaggggcgggccgataaaaaaaaaaaaaggtaanaaacgggggaatggaagggaaaattttttaaaaaggggaaccaaaaataaatttgttggccaccttttaaaaacgggggaactggaaaaaccttggggtaaccaaaataaataccatggcgccaaatcccctttttcccaaatggggaaaaaccaaaaaggcccgccattatcccctttc

SEQ ID NO: 461309 - DNA, 495 bp, Sorghum bicolor
tgcgtccgcagcacccaaggagggccaagaaggccacacccaccaatggcgctcctcctctccccgaccgtctccttcctcgtctcccccgctgctccacgctcccgagctctctccactgccgccaatgtctcctacccagcctcaaggctgcaatgcaagaacctgtcctccctacagagccctctgaatgtgactgctacttgtgcttctttcgccgagaagaggccggttcttgtccatgccacggcagacggttctgaggctggtgcggagcagccagaagagccgaaaccggtgaccaagatcgaggacatgccgctcgagtcgaagcagaagatgatcatggagcagagggcgcggatgaagcttgccaagaaactgaggcagcggcgcaagcggcttctccgcaagaggaagcttaggaagaagggcaggtggcctccgtccaagatgaagaagctcaagaatgtatgaaccagatcaatgttgacc

SEQ ID NO: 461310 - DNA, 201 bp, Sorghum bicolor
ccggtcgaccacgcgtccggagatctccggaggggctagctgtacaaggatgggaaatatgaggaggcattggagaatgttacagtcagcctgggatcgaatacctggagtcatgaggcttcattgccagctcaatgttgcctgaactactcaaaactaggacatgaagaagctggtctatatgaactgaaggaaacccta

SEQ ID NO: 461311 - DNA, 429 bp, Sorghum bicolor
cgtccgacgagtgatacggtgatacctttggacactagtggcgtttcagtgtttgtatgatactttcagagtacaataatacaattgttcacattaatgctaatgtttccctaaagaagcaatgctgttgccattatagtgcaataaacattatatccttgttgagagtttagctggtatgcaaatgcaagtgtaggattttaattattcaaattgatcagggatgggaattactttatatgatctcaaattagttcatgaattctggggaaatgtcaaatttgtccttatcggaattattctctattttaccatttaagaatgtctcaaccttctaggtttttttttccaatttactgcattaaattgcaatgtatatgtgctatggttaatccagtcttgggtctggaagttgtcttgatttgctat

SEQ ID NO: 461312 - DNA, 396 bp, Sorghum bicolor
gtccggcatccggtcgaccacgcgtccggccggccatggtggaggaggaggtcgtcatcaggggggcagcggcggcgcccgagccggagccgcacttcctggtggtgaccttcccggcaatgggccacatcaacccggcgcgccacctcgcgcgccgcctgctgcgcgccacgggggcgcgggtcaccgtctccacgtccgtgttcgcgctccgcaagatgttcccgggcgccgccgccgagacggagccggagggccaccgcgacgcctcgggggtgtggtacgtgccctactccgacggctacgacgacgggttcgacaaagccgtgcacgaagccacgcactacatggaccagatcaagctgggagggtcgcgcacgctggggaacgttctcg

SEQ ID NO: 461313 - DNA, 85 bp, Sorghum bicolor
cgtccgcccacgcgtccgcccacgcgtccgagaaaaaaaaaaaaaaaaaaaaaaaaaaaaaaaaaaaaaaaaaagggcggcaaga

SEQ ID NO: 461314 - DNA, 114 bp, Sorghum bicolor
cgtccgcttattatccccacccattgtcgtgcataggaaattgctagcacatgatatgagatttgtgtatgcggcaatttactagaccatatgtgcgtgatgaagctcaaccta

SEQ ID NO: 461315 - DNA, 339 bp, Sorghum bicolor
cgtccgcggagcctcgtggatcttggtgagaggaggtatggtgccctgccagtgctcgatcagcaaatcggacagctgaacttgaggctattgttgtacacaccaccacctgcactggatgaatcaattgcaatttctaaagctattcaattactgggaagcacaagaatacatcttgtttagccgtattgtattggacactgcctctacagtccttatactgaatgaaattacgattggcattatttcatgtcagtcttcactgacagcatctgtaactataagggacctctcacatttttactaaactattggtatttattagttatgcgagggaac

SEQ ID NO: 461316 - DNA, 118 bp, Sorghum bicolor
cgtccgggcaagcacatcagagaaaggcgtctgggtcatgtctttgcaatacgatgagagcctgctttacacaagactgagtgaggtgaggctgcaccaccgtaccttccatatcaag

SEQ ID NO: 461317 - DNA, 74 bp, Sorghum bicolor
gccgtccgaatttctcatgtggaaatgaagagagaggatgggttccataacactgttaaagagggtgatgagga

SEQ ID NO: 461318 - DNA, 386 bp, Sorghum bicolor
  unsure (1)..(386): unsure at all n locations
cgtccgctgaggattggagtttgcatctgctgagtctcggctataaatggactgacttcttaccaaggttgtgcacgtgtgtggcttcaaagattgtggcaactaaattcagagttgccaacggtgcgaggtgcagcttaatccgagttgcagagttgggagaggtaggagtagctgggataaggggtttagtgtggtttgataggattacagattagcgtggtagcaaaagtagcataaataggaaacagaattgaggcgtgggatagtcccacaaggaaaggttttgtacatcattggttcgaggtatacttgtacaggcaatcaatccagtttttacctancancatnangcttttgntctttgcggannggacttgaaaggc

SEQ ID NO: 461319 - DNA, 308 bp, Sorghum bicolor
  unsure (1)..(308): unsure at all n locations
cgtccgcggacgcgtgggcggcgcgtgggttttttttttttttttttttttttttttttttttttttttttttttattagacaaaaaaaaaaaagaaaacgaaaaaggaaaagtaatgttaagaaaaaaaaaggagggagggaaaaaaaaaagggtaattaaattatattaaatttaagaaggggagggaaagtgaggnattgaaatataaaaaaangaaannnanggagggaaggggtatgggattnnaaaaaaaaaaaannaatttaaataaaattaatnnattggggggagaaaaaaaataatat

SEQ ID NO: 461320 - DNA, 246 bp, Sorghum bicolor
  unsure (1)..(246): unsure at all n locations
cgtccgccgacttccccgacgcaaccccccactctgtaaccctccggaatgttcgcctgcctctaactcgtcggcgccccaatctccggttgcttcctcgacagcccaatccgcctcttctcgctctcgctacggctcctctgcctgttcgccatggcgatccgcatcaccgtctcctactcgggctgcgtggcgcagaacctcgccgcgtcgctcggccaccgcttctcctgcgnctccgnctcc

SEQ ID NO: 461321 - DNA, 170 bp, Sorghum bicolor
  unsure (1)..(170): unsure at all n locations
cgcgtccgggaaagcatagcatagcaaagcaggaggagcagaggaagaatatatccatcatccacacaccccacacacataccttgttctccggcgtttcttgctgggcatccagaaatctcctcggagttgcaacaagcatgggcgggttcagcggcgctacnggtctc

SEQ ID NO: 461322 - DNA, 609 bp, Sorghum bicolor
  unsure (1)..(609): unsure at all n locations
cgtccgagagatggaggaagaagaaccgatcgatggcgtccaactacgtggacacgacgggcgaggagggcaggttccacggcccgcacagccacagcagcagcaccaccccgacgggcgccgcggcgtcgccgcgccacatgcgccgcagcttctcctccgcgtcctcctgtagccacagccagggcggcgggggcaagtgcgtgtgcgctctcctttctcccgcctncttctttttgtgcctgtttctttgcgcttggtttgctttccttttcttgtgtttttctcgtgcttgttttgttgttttttttttttttttttttgtttttttttttgtttttttgttttttttttttttttttttttgttttttttcttctcnttttttgctntttgntctttttttttttttttttttttttttttttgtgtttttttttttttttttttctttttttcttttnttttttttgtttttttggtttttttttttttttttttgttttttctttgcttgtttttctttttttgttttttctttcttctttttttttttttttccgtttctttttttgttcttttttttttttttttttttttttttttttc

SEQ ID NO: 461323 - DNA, 420 bp, Sorghum bicolor
  unsure (1)..(420): unsure at all n locations
cgtccgagcagattttgttgtttgggcctttggctnanctgcgccgagtcgtcattgatgatgctaaaatgctgaggacatactgtctgacacgaacatcctatttttttaacccgtcatccggcccctatcagctgatgaaatttccccccgatggtgaccctcgataatgcagtctggcgggtgctcggggccactgaatcgctttgttttattgtctagtcccgttctgtactagcataaatctataatccccatacgcaaacactcacgcatgtttgttgagtgtttcccccattatttagctcttagtttgatgagtccagaggaatcaggtaagctgtcgaaatcggaccgattcgatctcaggataatgatgcatttatgcctggaaaaaaaaaaaaaaaaccaaccacccca

SEQ ID NO: 461324 - DNA, 429 bp, Sorghum bicolor
cgtccgattagatgaagattttataccctacacagatggggtatctcgatctcttttacatgcgcatatatgtaactgtgtctgaatgaaacacatctattattgattcttttccatgctcatatagtgcacctgcacaaagtatttatttgagctctgactgatggaaacagaccatgattcatacatgcggggggagggtatagaagactggagcacgagaaactcatacggagagcataccaactgattgcataaaaatagggactgttaatttacgatgatagataaacatactgtctatccgaaggaggaggaactgacagaagctgcctgtgttgatttctttgagctggaataaaaggatggaactaccctactgaatgtaaatacttgatcattttgcgatactttctgcataatagttgg

SEQ ID NO: 461325 - DNA, 429 bp, Sorghum bicolor
  unsure (1)..(429): unsure at all n locations
cgtccgggccgagctcgaagaagttgcccacgaggccggagcagccgggaccgccctgcagccagaggaggagcggcgtggaagccggcggcgtgaccgggtccgtggcctcgtagaaggcgaagaagagggaggcgttcgcaggcgggatcgggaggtacccggacttggtcgggagcgctgggggtggggaacaccgttgctgctgtcgccgccgccgcgggtgcagccaagagtgggacggcggcagcgaggacgacgagaacgaggcgagcaagcggcggagccatgggactggtggaactgtcaacgtcggtgcgggtaggattgtaggaagggagtctttgactcttttgtatccaacaagaacaaggtgtgcagtgtaggtgtgctcatcgtggaaaataaacaactttccatgannaanaa

SEQ ID NO: 461326 - DNA, 395 bp, Sorghum bicolor
gtccctccgctgccgcccggcttggtccttctcaccgcggcttgggcgccacccccctacctccaccaccacttttttcgggggtgcctggacctgtggagtgaagcccagggttggcctctaccaacctaaaagcaccccgaccgctcgccgcctggaccgcggaccaatggctggccacctcgagcctcggcgggaaccctaggtcccgctccaggggtggacggcgaggaccggcgtcggcgtcagcggggtggaggcggatgtaacgctcgaccagaccccgatgttgcaatccagaccaatcgccacgatccggccttctctacaatagccccagcagacccagttcttcaccctccgcattgcaaaccagatccgctcccacacatgtc

SEQ ID NO: 461327 - DNA, 282 bp, Sorghum bicolor
cgtccgttgccttctgtctcgctaaacgccggcggggagaccaccgacaccggcgccctacagcaggtgtccaggtcttggtcggtcccttctccggcatcgagcacccaccaggatataccatggaggtcagaccgatggtagctctgcgtgctggcctagttggttttttttttaggatggggggggggtggcggggcgatgaaagcttttttatgtgtcaaaatcggtggggctgctgcagcgtggacagctggagcggctgctggtgtgtcccgaaaa

SEQ ID NO: 461328 - DNA, 374 bp, Sorghum bicolor
gcgtccgttgcggcacccattcctttgtgggccaaaatggcgtataaatccatcagcaaatctcatacgttggagcttgggatcaactgctgtccgcatggctgaagattatatctatggacatcatcagcgtagacgcttagcatattttgttgaattgatggaggttctaaaccctaacttaagaacacagaattggattcacctcctacctggtcgttggcgtctcttgtactgcactggaagacacattggcctaacacttcgccagccttcccctagagtcctcatcagtgatgtgtaccttacaggtaggtcagagtcagtcgatccagtcttttttctgacctttgatactgggttcagaattatgc

SEQ ID NO: 461329 - DNA, 277 bp, Sorghum bicolor
cgtccggattcccggtcgccccgcgtcgcccaaggagaacaaaatctttgcttcgtcgtcgacgctcccatcatccctgcgttcgacggaacgaggcagaaccccaacagggaggaagctagaagagtccggagagagagcatggcagaggagcttctgatccggcccccaaggaggaggagtcagggcgcgcagagagctgtactactgggagcaaagaacgggcgatagctggactgtggggggttcccacttggtggtggcgtgttttccttgg

SEQ ID NO: 461330 - DNA, 292 bp, Sorghum bicolor
gcctgcgtaccgtccggatcccggtcgccccgcgtccgccacgcgtcggtgcgcagcttgtgtgatgcggttgtggcagcagaagacgtgtaccggggcaagcctgacccagaaatgttttgtacctgtcactcctatttcatcccgagaggtgcatcgtgtttgggaactcaattcgggggaagcagcacacagccggtgagggtggcggcgcagcacacaaaattacacttatgccgaaccttggggaaacattaacactattgtgtgcttgaaaactcctgtataagcc

SEQ ID NO: 461331 - DNA, 476 bp, Sorghum bicolor
  unsure (1)..(476): unsure at all n locations
cgtccgcggacgcgtgggatttcacgatattgagagcatgaagttctagacagtgatcaatcaagcttaataactaacccaccgaggcgttttgtttcagtggatggcgctggaggagttcgtgaagcagcccttcatccaggaagaccacatgttccagaagatcatggacatctgcatccagcgcctccgcaagtgctactgtggcctgacgccgcaccacgtcgtctccaagttcgacgacagaacgtccacgctctactacaatgtcgccgagcctgaggacgtcaactgcagcgccacctgatatatgatgggagattgggagggatagtctagcttttgctgcgcaaagttttatgatgcagcaatggcgattgctgagagtgaaatgctanctagtacgtaacanattgcgccaggcaataacanggtgcccaaccctgncatatacgggggggggattacaagggaga

SEQ ID NO: 461332 - DNA, 348 bp, Sorghum bicolor
  unsure (1)..(348): unsure at all n locations
cgtccgcgacatgtccgaagagagaacctgaggcgactcttcatgtacaatagacaagttgcccactgtcatcccagaatctgtgtttgacgtctacgactcccatgtaaagtgacagtcgagcccgtctgccaattgttttatgtatttgctacttctactagtgctgagccctgggcctctggtgctgttgtgcctttttttttgagagtttcgaagcaactgggtgccaaggaggctaatttatatagggagctatacactgaatgtaagtagaacttgttctatcatcttgcgtgatgcgatttgggtctttatggtggtttagggtaattngacgctatatat

SEQ ID NO: 461333 - DNA, 341 bp, Sorghum bicolor
gtcgaccccgcgtccggtctttgggtaaagatcccggcatgcctccctgattgagggtttcacggctggtggtttcatttacattgctgtcgcgggagtcctcccacagatgaacgaccagaaaacaaccctcagaagctcagtagctcagctgatctccctgtcaatggggatgctggtcgctctaggcgtgtggggggtagaataatctgaatctccatttcacccgttgcagctttaggtccaaccgcagttaccccaagtcgatataattcttcagcaactccagactagaagccggattttttgacccttttgaatattggacccaaaaacggttt

SEQ ID NO: 461334 - DNA, 369 bp, Sorghum bicolor
  unsure (1)..(369): unsure at all n locations
cgtcggaggcaataaagagcgacaagcccgttacggcgccggtaagcaggcggagccagccgccgtgacgacgacggagaggtccctgccttcgccgccggcgccggcgccgaagcacgcgtacgagcaggagtaccggcagccgtactacgccccgcagccggtggtgagctaccacgcgtgggggcccgagctcgagcgtgtcgtacacgtacttcgcgccgcaggcacagccggcgtactccatgcagcaggcacacccgcagcaagcgtactactccacgcaccagccgcagccgtcgtactcgtactccgtgcagcccgagnncgagncggagaagcagnggtcgncnncntacctgtacatgc

SEQ ID NO: 461335 - DNA, 315 bp, Sorghum bicolor
  unsure (1)..(315): unsure at all n locations
gcctgcctaccgtccgcatcccggtcgccccgcgtccgcaagacagagggcttctgggaggatgtctccgagtggtaccaagaagctgagcctctcagggctttcaagcactcatctctggcatttctcctgcaatcatctttggcatggctttcaatgtgccgggggagtacctgtacatcggggcagctgtcttcatcgtggtgttctgatcttcgagagcccaagccggacaagccgncaacttcgagccggagatctacatgatggagaggacggctcgcgacaagctcatcnccgactacaactnnatgg

SEQ ID NO: 461336 - DNA, 339 bp, Sorghum bicolor
  unsure (1)..(339): unsure at all n locations
gcctgcggttaccgtccgcactccgggtcgaccagcgtccgcaagaggtcccgagcgagtcgtagaggcgtgcgtgcgtgtgtgtgtgtgtgctagtgctacggcgtacggcgcacagcagcagcggcagccatgagcaccgggcgcgagagcaccaccagcagcaggtggcccgagctggcgaccctgcgggcgctggcgcgcgacgccgcggagcagctgcagctgccgcgcgtcggcatgtcggcgtcggcgggtgcggcgggcgggagggagccgncnaagcggcagccggcgggggggcgcggcgggcgagaccgggaggaccacgnccacggc

SEQ ID NO: 461337 - DNA, 169 bp, Sorghum bicolor
gccgcgtaccgtccgcatcccggtcgccccgcgtccggcgggtcgctcgccgtcacgaaatccaccctctcccccgggcttcactccggccatgcttccgggcgaccagaaagattccaatgggaggagggggacatcgacacacgacgccacagcgcagaaacatact

SEQ ID NO: 461338 - DNA, 345 bp, Sorghum bicolor
cgtccgcaacagtaacgattctttaattcagctagctagcatgtactaaaccgtgagtagctagtttactacacgccagccctgacctggttcgtaccataactaaatttgacccggccagtcccgaacgatcgtcaggatcagcacacgccacgctgacatatatagtgacatagtagtagagctatagatgaactggtgggcatgcactgagacgcgagggaaacctaccgagtggtgattgcagggcagtgtctggcggatcgatgaacccggcgaggacgctggggccggcgctggcgagcaacctctacaccggactctggatctacttcttgggccccg

SEQ ID NO: 461339 - DNA, 210 bp, Sorghum bicolor
cgcgtccgcggacgcgtgggaaaaaaaaaaaaaaaaaaaaaaaaaaaaaaaaaaaaaaaaaaaaaaaaaaaaaaaaaaaaaaaaaaaaaaaaaaaaaaaaaaaaaaaaaaaaaaaaaaaaaaaggggcggccgttttaaaggatccgggcttccgttcccgggcttccaactttttacctttttttttggggggcctaattttttttttt

SEQ ID NO: 461340 - DNA, 531 bp, Sorghum bicolor
cgtccgcccacgcgtccgcacacgccgcacccaaagcgaccaacctcttgcttcccaccgtacctgcctgccacgccgcagcctccggctccgatgtcgtcgcagcgcccgggccgccaccagcgtcgcgcgtcgcagagcgtgttcgtgctcccggagaacctggcctccctcgacgtcgacgcggcgggcgaggtgggcgcgaattcgaaggccggtggcccagacggcgccggcgccgagcagcaggcgaggccgcccgcggggcgtcaccgccgcgccatgtccgtggccgtggcctccactagggacctcgagctgatcaaggaggacctcggcagctacaagctcggcgcttgagagagggggccggctggcacgtcgcgtcatgtgtatatagcctgtgggttagccgtgcccagacctggctttgatcggcgcttaacagtggcttaattacaaggtctctcctccggtggtctttttggtttcgctcaccacacccatatgtaatactactactagtactat

SEQ ID NO: 461341 - DNA, 393 bp, Sorghum bicolor
  unsure (1)..(393): unsure at all n locations
cgtccgtaatgaaaacattttaatttagtttgaaacacgtactttagtgcctattttggtggtcctaatatactttatttgtaaaactactatctacttcaaaaaaacatgctttaactttattttaaaagtcaaactatcaagtttgaccaagcttgtagagaagattattaacatttatgacgcggaataggtacatcatgaaactatatttcatgatgaatctaatcacacttatttagtattataaatatttgattcttttgtataaatttgatcaaacctaagatagtttgacatagagcaaaactagaatatcattgttttttagatggagtatttatatagctttcaagttttaaaattnaaatactacatatgggctttaattat

SEQ ID NO: 461342 - DNA, 198 bp, Sorghum bicolor
cgtccgcgggaaaaagctgagcaaatcgaggtgcaaaattttataaggaatcacgggagaaccgccatgtctagctgtttgtgtaaaattaagggagagagatgcagaataggagtaatatttgcatacagagacgatgtaagattgtgagaatcatcacataaacacaaaagtcaaagtaagtgactgtttctctgc

SEQ ID NO: 461343 - DNA, 411 bp, Sorghum bicolor
ccgtccgacattgttggcacttttgccggtttctttgactccttgtctctctgttgtaacacccttgctcacggtgcgctgttggcagtgtgtgcccttcgtttggaggaagtgatcctggggtacgtgcagaagttgtccattcattgaaagaggaattgaatgtgatgtgtggcctctcttgctcacggcatccatcagcttatactgctctctctgtaagctctagttaacatttctcattggttctttctaggattatagtttagacgtaacataatctctacatggcagattggacgatcaaagtggaatggtcaagtgggtagttctggagtggtaatcactttggaaacccctcttaataacattggaaggccgtccttatctgttcaactgaatggtggtttt

SEQ ID NO: 461344 - DNA, 389 bp, Sorghum bicolor
  unsure (1)..(389): unsure at all n locations
cgtccggtgcaagcggcacccggagcaccggatgtccaagggcgtctgcccgtactgcctccgggaccgcctcgcgcacctttccgcctcttcctcggcgaccaccactacgcgggcctcgtccacagcgaccacgtccctgtgctcctccggcggctcgtccccgccgccgcaccacgccgcgttctccgcggacgtcagctccgtccacgtcgtcggcgccggctcctccttcgccgacgtctccgccttctcgcagccgctgatgccgacctccgctaataagaagaagccgccgccgccgccgncgacgacgacgacgacggggaggcaagacgacgaggcggcggcgcaaccggcgagggggaagggcgaggngaanaggaaga

SEQ ID NO: 461345 - DNA, 110 bp, Sorghum bicolor
aaacaccaaaaacatatgctgtgagaggaagcactgcatatgctcgtgtgtatgacatccgcaagcgcaagtgggatggatcatctgatcttggacacacatgtaactgc

SEQ ID NO: 461346 - DNA, 251 bp, Sorghum bicolor
  unsure (1)..(251): unsure at all n locations
cgtccgccgagtataggcctgctccatatgaccgtgctaggaggggaggaggggcagctcgtgcttatgatgatcgttactaaagagtgtttccttgaagcagaacagagatatctgtttatttcagttacacatcagtatttacatttgccaggttgatccttcaattagttattcagcagggggggggggtattantctctgaaaacaatnnttcantatntnanttattantatnnttnnaccataat

SEQ ID NO: 461347 - DNA, 82 bp, Sorghum bicolor
cgtccgcctgtcgaatcctcctgtgtgtatacatatgcatgtaactatgtctaacaaaataatataatacaagcattctgcc

SEQ ID NO: 461348 - DNA, 311 bp, Sorghum bicolor
  unsure (1)..(311): unsure at all n locations
cgtccgaccacgccgaccccaccgagggtggcaccgagggcggcgtcggcacgccgtccttcctccacgagctgctccgccccaccctcaccggccgccgcgcgggggagcccgtcctggcgctgctcctcgacttccgcgacgacgcgcacgcggcgtcgtgggaccactccaccttcgtccgcgcctactccacctacctcctcgccgccatgtccatccgcaaggcgctgggcgcggtcaaggaccaggcgacgatcggcatcgcgcgggtgacgggcgcggnggcccccgnacctcgacggggcctc

SEQ ID NO: 461349 - DNA, 425 bp, Sorghum bicolor
  unsure (1)..(425): unsure at all n locations
cgtccgcggacgcgtgggtttttttttttttttttttttttttttttttttttttttttttttttttttttttttttttttttttttttttttttatttttttttttttttttttttttttttttttttttttttttttttttttttttttttttttttttttttttttttttaaagggggacgaaaaaattttattaaagaccatattttttttttaaaattttaaaaaaaaccgaaggggcgccccccaaaaaaaaaaaaaaacccttcaaaaattttaatttaaaaaagcgagggggcccttaaaaaaaaaaaaaataaccccccccataattcaaaaattaaatgntttataaaggaccacaaaaaaaaaaaaaaaggnggcannaaaaaaaaaaaaagaaaaaaaaaaaccccggnnccc

SEQ ID NO: 461350 - DNA, 288 bp, Sorghum bicolor
cgtccgaatggggtctcgtgccggaggaaaataatcaggtatgagctatgatggtaagaaaatggtggaagtttgagagtggatcttgatatgatataggatgtgttatttacggtttgagatgaacagtattcttaaagttgatggtgtttaataagcacacgggtgtgctattgacagaatttgtgtatggaaggaaggacaaaaggtggcgggcataataaaataataaggaagagctgttatgagggtgaggtcccgctaattaaaaaaagaaagaaaattttt

SEQ ID NO: 461351 - DNA, 564 bp, Sorghum bicolor
agcgtccgccgagtcggagccggcggctggacggcaaggtaacttcgtcacgcctccaggaccagggcctggtacctggaaggcgtacctgcccgaggaccgcggacccgggaccacccggcgtgccaacccgttcgggccgaacgggcggcggctcagggggctacccttcaccaagagcctcatcatcgtgtcgggcctggacctcacctgcgatcggcagctggcgtacgccgagggcctccaggaagatggccaccatgccaagctcgtgtaccgtgagaaggccaccgtgggtttctacctgctgcccaacacggaccactaccacgaggtgatggaggagatcgccgacttcctcagggctaacctctagtacatactactacgacatcacagctgcctgcctgctgatcataagactcatcgaccagtggtcgtctcagacacaaacttcaacctcttgttatagcaagaagatggtaagcttgacttatagttgtaccgatctgctctcctcctccgccttatactgctgctgctgctgcttgggggtaatctgct

SEQ ID NO: 461352 - DNA, 557 bp, Sorghum bicolor
cgtccgccaagatacctttgtcttgcaaggtgccaaatcgggaaaactgaacctgcacttcaagtggacgccacagccaatctatcgagatcgtgaccgggaccagtgagacctgtaaacgagaaggcagataaacacttatccccaacggtgcatgcatattagctgtcctgtacacaaatcgacagttcttggagccacacgaccgaaaacaaatgaaccgatcgacaaacttggagttgaatggagtttgataaattttgatagctgcatgttcaaaaaaatttgtgggaaaagttggtagttcttacgttaagaatgaagaatcatgtacccttgctagggtacttgtatattgatagtcctttttgtttggctgataagccatgacaaaattgatatgttgtgggagaaaaatactgttgaatgactggtagattcggttgataagtttaaacgaacagattgaacaatataaaaattagactagtttgttcaaaaaaaaaaaaaaaaaaaaaaaaaaaaaaagggcgggcggccttttttttttttttttt

SEQ ID NO: 461353 - DNA, 171 bp, Sorghum bicolor
cgtccgcgctgctacactcctcgcggtcgcggcgcccgctccgggccgcgccggcgccacgatgctccaacgacgcccagccctcgccgtccaccgcgtccggcgccggcggcgtccggcgcctggtgctctcgcccgagggccgcgcgatgctagacccgcggccggacc

SEQ ID NO: 461354 - DNA, 127 bp, Sorghum bicolor
cgtccgaaaaaaaaaaaaaaaaaaaaaaaaaaaaaaaaaaaaaaaaaaaggagcggaagatctaaaaggaatccaagcttacatacgcagtgcatgcaaaaaaataaatggggtgtcggttcaaagg

SEQ ID NO: 461355 - DNA, 302 bp, Sorghum bicolor
ccgtccgaaaaatttaaaaaaaaaaaaaaaaaggggaagggggggaaaaaaaaaaaaaaaaaaaaaaaaaaaaaaaaaaaaaaaaaaaaaaaaaaaaaaaaaaataggtttaagggttcaaaggggggggggtttgattgttggggggtttcttttttttatttgattgtttttgggtttttttttttttgtgggggtgggggaaattgttggattgggggggtttttttttttagggggtttggtttaattagggggtttttaaattttttgtgtttggagaattgggatttgggggaggg

SEQ ID NO: 461356 - DNA, 249 bp, Sorghum bicolor
  unsure (1)..(249): unsure at all n locations
cgcgtccgggagagcagcggtgcagcagcggcgggggagcctagtactacgtcgagctttgccagggcgtcaacgatgatgagttctcgcgcggcgtcggcgtcggcgtcggcggcggcggtggccgtaggcgaacatcgccgtcagcacgccacggtggggtacggtgggctgccgcggcccatcaggcctgttctgggcgcggcgggcccacggcctgggacgccgaggccggggggncctgctcct

SEQ ID NO: 461357 - DNA, 371 bp, Sorghum bicolor
cgtccggaaatccgctcttgtgtctgaaatcgaaagactccaggaagttgttaagaattttgaacggaacctaacagaagttacaggagaaaaattgcagcttgaggcccaggtaaaggatcttgaacaagtttctaataacttagatgattcttctgcagagattataaagctacaaggaataatcaaggatctgcaagcaagattggaaaatgactcaaatgagaagggtgtacttgaggaacgtgctatggagttggagcaagttcgtaggcagttggaggattcaagggctgaggctagggagctacaagctacaattaaggacctgaaagatgacctagaaaaagctcttcaagagaaagcagaac

SEQ ID NO: 461358 - DNA, 156 bp, Sorghum bicolor
cgggtcgaccacgcgtccggtcgatccaggtgataaaatagaagcctgcaccttgactccaagcctaggattcaggatggcgatgaacaggaaaaatatcacctgactgagtatgagaggtcactaaaaccagagaaggtagatgatctatcagag

SEQ ID NO: 461359 - DNA, 92 bp, Sorghum bicolor
cgtccgccagggtgcttaacactaattttctgttatttttgtatcgagaacatccggtgatagccatatatggttatgagttttgttaaaaa

SEQ ID NO: 461360 - DNA, 371 bp, Sorghum bicolor
  unsure (1)..(371): unsure at all n locations
cgtccgctaaaggagtgcaatacaacttcatgatgaagctagtgcccaaggcttgacctgtataagatctgaccaggaaaaagaaaagatttgagtctgtagattctgcacagatgcacaatttgctccattcatgtgtacagcatttggtatatagttgaggctactttgtaaatggtatatatcagcttacgtattgatccaaagtggtgagggtgttggtgttcaaaccagcccgtactagctgttggggggaaatgaactaaagcatacttcacttgtcttattgtgtgtaattcttgagattctaccggatgccagccttgctgctggggcgaagttctaaaanaaaaaaaaaaaaaagggcgggc

SEQ ID NO: 461361 - DNA, 183 bp, Sorghum bicolor
  unsure (1)..(183): unsure at all n locations
cgtccgtttttttttttttnttttttttttttttttttttttactatttttaaatatttagatggtcgttttagaggatccaagatgatgtaagctgtggaggggaggggatagggatgtaaaaaggggaaaataaagtaaattaaatgggaggagttgggaaaaaggtaaaaaaatgggaaa

SEQ ID NO: 461362 - DNA, 157 bp, Sorghum bicolor
ctgcggtccgtccgcatcctgtcgccacgcgtccgcctcctggttcgtcccctcccatcccatgcatccgcccatcacacacttctcgcggagcgccagcacccacctggtagccctccacccgccgcgtctccccacccttggcgccttcacattc

SEQ ID NO: 461363 - DNA, 259 bp, Sorghum bicolor
  unsure (1)..(259): unsure at all n locations
cgtccgcttggcagtactactttgatagtcttctaccaagattcctctcccagtaactcgtcagatacagccaatcttgtgaagatgatattgcccacttaactatcatgactacctgaacactcaagtcaatgattgacaagcaattggggattggaatatggaagttttaaaggcatgtgagggtcttggccctctaagtgccnagcctgaggtaatgacaacagatctgattgaaaaggacaaattnctgatcatg

SEQ ID NO: 461364 - DNA, 330 bp, Sorghum bicolor
cgtccgcaccgccgtcgcggcgctcctcaggaatgggcagcagcgcgcgtcgtcgacgtccttcctcggcggcaagacgctgctgaggcaggccaccgaggcggaccgatcgactgtcgggcggcttttttagaggtatacatgtttacctctggttgctttcaacttttttttttttttttggtgtgacttaatttaatttgactgggggttagtttataaacgttttggatggtaaaaccctgcttttcccaattttattgtacttttatataattccctttttgccagttggtttaataggaaaaatatcttctcttttcttttttt

SEQ ID NO: 461365 - DNA, 275 bp, Sorghum bicolor
ggtcgacacacgcgtccgtgaggctatggcgatactatcattgcatttctagtcatccatcagggaaagatgatttgctgtttatctatggtagaaagatgcgcattcttgcagacgacctcgagattccatcatgatggttgtatagtgcgcggctggctcggcagttctcgatgaatactatgacagcttgcatgccgtcggagggtagccgcactgtgctagacccagtcgctttctaaaatctgggaagtgctttggatcaggaatcctat

SEQ ID NO: 461366 - DNA, 219 bp, Sorghum bicolor
cggtcgaccccgcgtccgtgaggatatctatggcttttttgatcctgagtaccattctgaatatcaaaatagaacctagaggccgactcaacttgactagaccgcatgcccagcagaaggccaccatcgaacgatacgagcaactccaggaacccacagtccatgacacaaaaaggccagcaggctcaggctgcatccgagaggtcatcctctttaagc

SEQ ID NO: 461367 - DNA, 330 bp, Sorghum bicolor
cgcgtccggggggattatgaccggaatgcactcgatgaaacccttcatgcattctgcgacaactgatccatctcagttttggacttcacttctgtatgatagtactactaggctatgtatcgatcagagaaaagattgcgatgtacattagcttctaccattggtatatttttgtcaggaataatggtgtaattgctcatgtgttggtttgagtttgtagagaaccatggctaatcaactgtgattagttgttctcagtagtaataaagaagcttcactacatccatctctatagattctgttaatgtcaggtgacaatactcttgtagc

SEQ ID NO: 461368 - DNA, 175 bp, Sorghum bicolor
cgtccgcgaagacataaaactctgctggtgcagaactagatgaaagtgaaggtgcttctatttctctggataaagtgctcaattgtgcaacatcatgcatcagtgtcgcttttccacaggatattatcaaccaaaagaagaacgttttaaaattaatattgaattctctctcacc

SEQ ID NO: 461369 - DNA, 136 bp, Sorghum bicolor
gtcgaccacgcgtccgctagccactcgagtgctcaacaagagagagagctagctagctagcccagcatcatcaatggcggcctcctcgaccctcttggtgctcctcgcagcagccttggtggccggcgccagcgcc

SEQ ID NO: 461370 - DNA, 409 bp, Sorghum bicolor
cgtccggacgagcagcgcgccgagcgtgtcgcgctccgtgttggcgagaacttgttcaacttcatgcaatcgttctgcggtgccgacggcggcaagctggtagtgcccacggacatcctggaccggtggttccgcaagttccaggagcgagccaagaaagatccagcatacctcaagagcttcgagttttgagaaaaagggtgatcgcaggttgttttgcagataccatgtgggaagaatgtgttggatagcagtgtttgtgccacagctaggccctcctatgctgcacacagtgtcacgccgtgtcctaggggctgactaaaccaaggtgcatatgcagcttctcctattatagacaaggacaacgacaccaaaagcaaccagatagcttagatggtgggggtttaag

SEQ ID NO: 461371 - DNA, 263 bp, Sorghum bicolor
  unsure (1)..(263): unsure at all n locations
cgtccgggactggctcaggtaccttccgaggagctggcttctgcctttgatgaacctctcatcataaggcatcctcaaggccacactgtccctaggcttgacgatgtgtctgtgaaacagctttctgaatggagctcatgcattctggaagaccccaagaatgcaaatgttcccgaggctggggggggaggcaaaccatctgataaggaggctactggtgccgaattcnaggccttacattcaagcaaaccatctgataagga

SEQ ID NO: 461372 - DNA, 317 bp, Sorghum bicolor
cgtccgcagcaggctcaacagtccagagctacaaggattgcttccctacgactttggatgatagatgccgccaccgatgcataacaatcaacaatgtatcccgtccctagttgaaaggaggaaaaacaagatagtagtaaaaacctacgtagcttggagaatgccgtgactatataaatgtataatattcagacaagatttgacaagggtgtcatagcatgtcgtgatattctgtgtgcattcagctacaacataaaatagaatgtcttcagacgaacaaggtcatacataccgatacagaagaacggaggtaaccg

SEQ ID NO: 461373 - DNA, 123 bp, Sorghum bicolor
cgtccgctcccaatggccgtgcaccccacgagcacgccgggcttgtccccgcgcgcccgcgtctccccgcccaggccttccacctccctggccgccacctcgtccaccccctgctcttgcact

SEQ ID NO: 461374 - DNA, 264 bp, Sorghum bicolor
ctgctctcgctcacaaagcatacaacaaaaaaaacaaaaaaaaagaaaaaaaaaaaaaaaaaataatgggccatcatttaacacttccacggcttgcaaatgcccaacccttacccttcttaatcgccttcgatggcacccaaattcccccagctggcctggttaaacaaacggcctgaccggataaacccacagacctgctccacttagcgggacttgcaatcgttaagcgcctgtgggagggggcataaagccccgaaaggc

SEQ ID NO: 461375 - DNA, 215 bp, Sorghum bicolor
cgtccgcggagcttcgtggatcttgggaagaggaggtgtggtgggcagccggcggcgatctggcggggaggatatggccggcgggaaggagccgatcgaggtcaggttccggctcttcgacggcacggacatcgggcctaccaagtacgatccctccaccacgtggttctctttacaagagtgggggggggggtgccttttcatacatatactac

SEQ ID NO: 461376 - DNA, 273 bp, Sorghum bicolor
cccgggcgaacccacccgtccgaggtcttttcctaaggtttatacctggcggggagttccttattgtgtgtataccaagacacctttattactgggtgtcacagtgttatacacacaccacgcggagaaagagatctgggggccgatataagaggggtcttatatctctgttgatagtgatgatgtggagtaatcctttcgtgaggaagaggggaggaagcaagaaagcatgctcgtctgttctttttgctagcaaggacgggcgtttcttga

SEQ ID NO: 461377 - DNA, 175 bp, Sorghum bicolor
  unsure (1)..(175): unsure at all n locations
cgtccgtctagttgtactacacgcttatacgagcaacgaagggaggactaccaccagcaccagaccggcgaggctgagctcgtcgccgtgctcctgtgccacacctagcaggtgtgcatgctcgtatcgcgggctccgagtacgaaggaggtgttacagttgtacatnnttattt

SEQ ID NO: 461378 - DNA, 309 bp, Sorghum bicolor
cctccgtccttttccaaaattccttgcgggggcggctggtccaagtatttcatgggggcctccggaagaaggagagtttttatcctcctagcacgagccgaaaaacatatcagggctgggggaccatcgcaggtggggtaatttgtgctcaagaagctggagggcacacatgtcactggagaggggaaccttgggatttcgctgctgaccaaacagggcgcataatcatctatccttggggtggtgttctggctaccaactgtgctcttgatgaccagcttgtataaatgatcacagcttcttataatt

SEQ ID NO: 461379 - DNA, 355 bp, Sorghum bicolor
  unsure (1)..(355): unsure at all n locations
gcctgcagnaccggtccgcatcctggtcgaccagcgtccgcgagatctgggattccatgggagattgcaaagcttggtgtccggcaggggatgtggggctggtcaaaaggatagagcctgccttcgggcataccaagttgcaaggaccgctggagagcctatttcgaaatgtgctgccatggcacatgtcaccaccaggttctttgcggatgagctgggtacagaagaaaacacatagggtgtctcatccaccatcacacgtgtctataggccgcatccattccacaacttactgatctgattaattcaaatgccgaaggggaccaagaccagagaacgttgtggttaccgatac

SEQ ID NO: 461380 - DNA, 471 bp, Sorghum bicolor
tcgcccagcgtccgtagagtctgctctcatacagtctatctcatcttggaggggaactacctgttggtgatttttggcataggccactaggcaatactcaagccgagaagaacaccgacaacctgccccaggtaatctgtgctaactatacgtctcaatatttgttgtctacattgtcacaatattccagtattgtctagtacagtcgatctttttcatcaccacagaacacaacttattgatagaattagacagacacatttcttgcaacgtatctaaacagtctttcacagtggtaaacactataattggtacatgataaaaacatagctgtgtttttctgtgaagcacgccattcagttgtctgattttgctttccctggaatttcagaataaaggccagtctaagtctaacaatcatgaagcactgagtaacgagtggctggaaacgggccaatgtccacttgcaag

SEQ ID NO: 461381 - DNA, 184 bp, Sorghum bicolor
cgtccgatccggtcgacagcgtcgaatcaatgttatgctacggacttgtggagccatagattcctagccctttagtgtcacttatgcataggcataggtcttggacagtaatgtgaaagcatggtagaagagataagtgtgaacttgcagtgtagttctgagattggtgggggggtgagtttct

SEQ ID NO: 461382 - DNA, 541 bp, Sorghum bicolor
cgtccgataccttgatgagattgtgaaaaccattgatgcaatatcaagggagcaattattgcacatctgctgcctgcttttgggataggaagggccaccccagttttcagcatggttcctgttagggccagggcattgcttccaacaatcacagaggaagacagagtcatcttgaacaatgttgagaaggttgtgaagttcctaacatctgggacagcaactccaacagtgggcggggacgtaaacatggtgtctgtagtacaagagcttctacctgtgttgccaggcatctcatcgaagatcctacctgatgtcttgagtcggttgtcatcacgagtatttgcacggctgatccgagaggcatttttgtaaagcgtttttttttcttcccccctttactaacaggaaactacaattagttatatctgccaaaacaacacacaaatgatagaagattgtacagcaatatgatgtatagaaatttatatctatgccagttaacccaagcttaaccaacaaaaaaaaaaaaaagggcgggcgc

SEQ ID NO: 461383 - DNA, 202 bp, Sorghum bicolor
  unsure (1)..(202): unsure at all n locations
cgtccgaatcccggtcgccccgcgtccggctggacgagctcatggcagaccatcggctgtgagtgcaacggcggacagcaaagctgagatgccggggagagggcgagacgaggagagaggaaatcctctcgcaccggagacgacgctgctggacatgatgccgancanatgaggccanaggagatgacganctggaatcctg

SEQ ID NO: 461384 - DNA, 238 bp, Sorghum bicolor
  unsure (1)..(238): unsure at all n locations
gcgtccgcagtagtgtgtgtgtgtgtgtgtattctacacgcctacaccttcaatgcacatgtgtgcctgatggctggaagatattatatataacttcggatgcttagcagccggccaggcaagcaaagacacatgtctgcttttcagtagtcaggctgtggttgcaggtgataggtggagacaggtgagaggtggagacaaggtacatgcggngactagtgaataacgaggataggat

SEQ ID NO: 461385 - DNA, 385 bp, Sorghum bicolor
ccggtcgaccacgcgtccgatgctatatatgttgttttctcagccctcccattcttgcaactagtttcctgtatgtttgttgaggattctccaaaaggattccacagtgccaatgatgaacacaagtatgcagacaatcagagttctgttactgccttttctgaaaaaggctctagtgaagcacttagatatgagggcgctagaaggcggaagggaactcgtaaaaataataaaaggagatcactgtcaaagcgaactgagtctgatgagaaacacaatgggtcaattaattctctgccaagtttgtctctgagatcagccttattcagtgtgtgcacactttttaagtagctcaaccttctgctgcatatgctatggaacttgt

SEQ ID NO: 461386 - DNA, 461 bp, Sorghum bicolor
  unsure (1)..(461): unsure at all n locations
cctgcgttaccgtccgcattcccggtcgcccagcgtnccttgctgcaattgataagtttgatgccatgttgtcgagaagcaacacttatgctccagaagctctctacagatggggcactgcactgcagcagcggtcctatctgcggcctcggaacagcagggataaggtgaggcttctggagcaggcgaagagcttgttcgaagatgtgctatatgtggaagcagacaacaagatggtgagggaggcgctgtcatcgtgcatatcagagcttaactaccatggccgatggttatagacagtttgttttggcggagcagctgcgggcctatatgagctacctatcaggaatcatgattgccggatgaatcaatataagcagctaggatgtgatttacaggacagtagtttnctctgcctcttctgcttggagcaactcaagcgaggagagaaacataagctc

SEQ ID NO: 461387 - DNA, 416 bp, Sorghum bicolor
  unsure (1)..(416): unsure at all n locations
cgccgcgtaccgtccgaatcccggtcgccccgcgtccgacgtcatacacntatggcactagtgtccgctctgtcctcacatgtagttgtgggtcccagtaatggcttatgcgggcgctagtgtttccccggccggaccgacgtcgctcgctgtgcacggcgcttgctgtgcgtcgcgttgttctgcgggggagggaggaggggacctaccttcctggtctcggagatggcgggccgcggcgagggcccggccgatacactactataagctctcctatcggcaagcgggttggaaaagtgctccttttacggtctaaatngtctttacatagcttatacacattggattgattaaaataaacagtgacttgtggtagcctaagtacaattggatctgctggcaaaactttcaactat

SEQ ID NO: 461388 - DNA, 196 bp, Sorghum bicolor
acatcgacgccggaggctatggtgactatgccatgctagtagaacgttcattactccagacaaactcacagattgaagatagccttgaagattaagtggagtgccaagcttatgacaatggctttagcccagcttgaaacacgctgggggatgggcgcgcgatactgtcgccatgcgtgttttttgtctggtgtgt

SEQ ID NO: 461389 - DNA, 531 bp, Sorghum bicolor
ggccgcccttctttttttttttgttcactttattcagcacacgcggagcgctgatgcagctccattatttgggacccatattacaaagagatgggatcaagtgatgccatgacctgtgacacaaaggcgggatccaaaggggagatggacagaggtgactgctaaagatgaggacttgagatacggcactgcattattgcatgtaagctatggatccaggctctatacacaacactgatacacactgatgacataaactgatggagtacacggagggggaccaccagggagcgcccttatgcatggaccttgtgcgcccatcttgggctcccatgctgctatgatgggttactctggtggattaatttacggataaaattaacgtttgagaagagccttactgtaggcatggactctgggatcgttcagtgggagctatgctctattgaaatgcgctagtgcaagatgtatggggcagggcttagatgtaggggttagatctatccgcccgtgcgatctggccgatggata

SEQ ID NO: 461390 - DNA, 188 bp, Sorghum bicolor
  unsure (1)..(188): unsure at all n locations
cgtccgatgatgatgtgcgtggaggcgcgcggggggcgtgggcacgacaaaatccacaccaatgtcagtaacatttgctgctatatgaactgcgcaatggaagaatatgttctcgataagatggcanagaaggccacagaaatttgggacataatatgacatggtggttttttttttgaggggggggg

SEQ ID NO: 461391 - DNA, 180 bp, Sorghum bicolor
cgtccgtttttttttttttttttttttttttttttttttttttattttttttaaatagctaggggtcgtttgagggggaccaagatgactcacgcgtacatgccacggcatacgaggtgaggcgtgcgaggaaaatgcagaaaaaggggcgcgggtgcacaacgtgtagcaggaggaagc

SEQ ID NO: 461392 - DNA, 533 bp, Sorghum bicolor
cgtccgcgaactgagcatcaagctattggactgacacttgttagcacatcatgggcaataggtcttattattgggccagctattggtggatacctcgcacagttgaaaaatatccaaagttatttccagccaattcaatatttgggaggttcccatattttttaccatgtttgtgtgtatcattcttctgtttggttatcctcataagctgtatttggctcccggagacattgcataagcataaacttcacaaaactgaagatcaaggaatcgaagattttgctgagcaacaaaatagttcaactacaaataagagcttgcttaagaattggccattgatgtcatcaattatcttattttgtgtcacctcttttgatgatatggcttacacagaggtgctagcatccttttgtaccaaacatttgtttatccacgtattgtaaaagttcttggaccagtcaatgcttcccgtattgcagctattttgtctatggtgctccttttcacttatccaccaatgacacatctatcaa

SEQ ID NO: 461393 - DNA, 400 bp, Sorghum bicolor
ttgttcactctatgcagaacacgcacgagcccttatgcggttcccttattacgggacccacatgaccaagacatgcgatggagagatgccatggcctgtgaccaaaggcgggatgcacaggggcgacgcccaaaggtgactgctaaagatgcggacctgagacacggcaccgcattattgcatccaagttatgcatgcaagctctatacgcaacactgataccgactgatgacatcgacggatggaatacacggggggggtccaccacggagggcccttgtgcatggcccttgtgcgctcaccttgggcgcacatgctgcaatgacgggctactcgggtggattaattcacggataagaataaccgttgagaagagccttgcggtaggcagggactttgg

SEQ ID NO: 461394 - DNA, 516 bp, Sorghum bicolor
cgtccgcccatgcgtccgcagcgctccctcaaagagaagaagcgtgattgcgcagctgcagctttgcaaaggcggcagcagatgttgctgactcgtctacctagctcgtcaacagcgcagcagaggcatgcgtgcgccggcaagtcccacctccgcggcgccgccgccgcatgctggaggaagcgtgagaagctccccggcttgagggccgtcaagccgccgcgcgccgctccagggaaaggcggcattgtcccggccagcgacgatgacgacggggtcagcctcggcaccgtgaagctgccgggcaacatcgacatcgctcgcttcgagtccttgctcttccagtgggggaacagcctctgccaaggcgccaacctgccacttccggtgcctctcaaggtggacaaggttgagggcggcatcaggctagggttcatcgcggtggacaacggcgcgacgcagacgctggtctacatcgactgcctggtttctccggcgccggacggctccgggctg

SEQ ID NO: 461395 - DNA, 524 bp, Sorghum bicolor
cgtccgaaaaccctatccagcaatttggcatgccaattcctcatactttctaacttggcatatctgcatatctagtgcgcaaatatgcacgccggctccattcttggcatgggactttatcttcatgcttagcgggacttttcgttcgcttagcggaactcttagtttcgataacgggtttgtgggttttggaaacgaaattggccaaactgctggagatgagatctttttttactctctatagtactttaagagttgacaaacaacaagatttgggaaataaattatgacaaacagtgggagatgccaacctttgtttcataacatgattatgcaaccatttttacgcagaaatgtatattggctggttgccacctggctattgcacgatgaaaaactaacttccactgaactatatgggtgatactagaagaggccgaatcgactgatgcagatacggtgaacaagcaggggaagccacacacaattacctcgacgctacaggaaatgctctcggagctgcg

SEQ ID NO: 461396 - DNA, 417 bp, Sorghum bicolor
  unsure (1)..(417): unsure at all n locations
cgtccgaggcacccgtcgattccgatcgagtgaggcatggacgtcacaaccgccagaccaacatcccaaggtgcgcacgcggcaggaacacgccaccgatcctcacaaccttgcgtacagtctaatgaaagatataattgcaacaagagcatagatgccatctcacgaattggttcgcaacacaaacccgacttatagggcacctttgctagatgcgtatcctagcttacagtaaacttatctgtagaggtacaagtgagangttcatgagtttagaggcaaactctggtacctgctggtgcatggtgcacagcctgggtgataatattccattctcagctaatgctagaagctgctacagtgcgagcacataacacatatgggaaaagtggtcaactgctggtacatagaaacacg

SEQ ID NO: 461397 - DNA, 342 bp, Sorghum bicolor
cgtccgcccacgcgtccgggcttcaggaaacaagatttcagggtgcaagtcgacggcgccggccgcctcaccgtccgcggccagcgctccgacgccgccaccaaccccaggcactcccgcttcagcaaggtcttccagctgccctccacctccaacctcgacgacatcgccggccgcttcgacgccggagtcctcacgctcaccgtacccaagcgcctgcctgcgtcgcagcagcaggtccgccaggatcaggatcaggcggcggccaagcagcaggaaaaggcaaaggcgccgcccaaggacgacaccgttgccaaggacgaggcggatgcccaccgacag

SEQ ID NO: 461398 - DNA, 205 bp, Sorghum bicolor
  unsure (1)..(205): unsure at all n locations
ccgggncgaccacgcgnccgcaaaacgcacaacagagcaaaaacaggggagagagcaaaaacaaagacacagagagaaaagaaggaaccaaagaagcaaaaaaaaaaaacaaagaacaaaaacaaaaaaaaaaaaagaaaagaaaaaagaaaagaaaaaaagggccacccccccaagaagaaccaaggcacgcgcgccgggggcg

SEQ ID NO: 461399 - DNA, 242 bp, Sorghum bicolor
  unsure (1)..(242): unsure at all n locations
aaaaaaagggggggggggttttttttttttaggggggggggggttttttttggggggccccccccttttttttttttcgggggggaaagaggagggaggggnttttttttctcccccccgcgggggggggtttttttaccacgcgggggggttttttttttttttaaaaaaaacggggggggggggtttttttttttttttttttgtttggcccccccctctttttttgtccgggggggggg

SEQ ID NO: 461400 - DNA, 125 bp, Sorghum bicolor
cgcgtccggtcgtcctcttcggccggaccttctccgaccgcgagacgctgctggggctcgtcggcgcctccttcgtcctgctcttcttcacctccgtcgcgtcgctcatcatctccggcctgctc

SEQ ID NO: 461401 - DNA, 492 bp, Sorghum bicolor
  unsure (1)..(492): unsure at all n locations
tgcgtccgcccacgcgtccgtgaagatagctgattcgtttgtgctatgttgcaaggggctccaacaagaaaacgcagtgcagagtttgatgactctgccatgatcaatgtacatatgcatagcaaggagcctatttctggtaaaccatggcacccgctacagtcgatgttgcctcatctgtcctggaagataaatctgtaaattcggtctgaagctcagcatcaggtggttattgtatcaacaagccctggcacaaaggcttcgtttgtaataataagcattgcatggagctgtctgctgaatgtgtgctagggtactttcaatactgggctcagcatcagtccagaagctgtactctgaacaaagattctggatggcttcttgtgccaactaggaacaatgtaaaactgatgtaagcatctccggccactcctgatccatgtanaactaagttaaaagttntaattggtatagattgggtgccgatggaca

SEQ ID NO: 461402 - DNA, 408 bp, Sorghum bicolor
cgtccgcccaaatattgcacagagtcgtcctatcaccagctctgaaagtatagaacagaaactgtatgggagggaccatataatgaatagcatcatccatgttatcacaaagagtgaacattctgctgaggtcctcacggtcattccaattgttggtccaggtggcataggaaagacaactcttgcacagcacatatatcacagtggagaagtgcaacaacattttgatgtcaaggtctggacatgtgtatcactcaactttaatgtgaataaggtgctaacagagattaaaaaatatatccccaaggttgatggtgaaagtagtaatgctactaactactggtgagttaattgggcaaagattgaaaaataagaagcttttgcttggattagatgatatatgggact

SEQ ID NO: 461403 - DNA, 443 bp, Sorghum bicolor
cgtccgctttcatttgtttggcctctttttgcactggcagtctgcctatttccagtttacccgtaccaatgcaagattgttgtactgtattcatgtgctggagctctactgttcatcgtctccattcttttgctaagagctgctatctttggcatattatgggttctccttgggaaacgcgtgtggttcttccccaacataaatgcagaggagacaacatttagagaacttgttcgtttttggcctgaaaaggatgaaggggagcggccaaagtggacatcaagacttttctatgctcttgttgctctattggtgatattactgcttaggcaccatgctcctgacgaagctgctagagccaggtaccaaaagaaggtttcaaacataattgatgatgttcttgaatggtctccgaagttagctatttttggaatgattgaaaa

SEQ ID NO: 461404 - DNA, 470 bp, Sorghum bicolor
  unsure (1)..(470): unsure at all n locations
ggtccggcaattcccgggnaaaaaaaaaaaaaaaaaaaaaaatttaaaaaaaaaaaaaaaaagggggagaagaggaaaaaaaaaaaaaaaaaaaaaaaaaaaaaggggggaggggtgttatagttttatatttttcttactttcatttttgttgccttggtctttttttttttttttttggtctctttaatttaatttgtttggacgtttttttatttaactgggggggggggggtttttctttttttcttttttaattttatagcctttcatctttttttcttntgatgtattaataaaaaggagtgcagcattgttctttttttcttttaggtgatttatgattggtggttgtggggtttcctcttgtagtgacttattcactgggggggttgttgttgctcccttcttaaccttttttttttttgtttgtctactacccccnctttttttttttttcttttcttaat

SEQ ID NO: 461405 - DNA, 349 bp, Sorghum bicolor
  unsure (1)..(349): unsure at all n locations
ccgtccgaaaaattttaaaaaaaaaaaaaagggcagagacgatctaaaaagataccaaactaacaaacacagtagcatgcgacataatagggtcttgtctattttaagcttccttgctttcgctggccggcgttcttacggcgaggttcttgtttgggcccccctgtttcccatccactgccccttgtttaacacccccctttttggaactcccgtggggttccccaagttaaccgctttggggcttgtcttcttttaaccagttggggtgaaaaccgagaggccccccccattggccctttaaaaaaaagggggcgttttgaatggggggtggaacccccnttgggtc

SEQ ID NO: 461406 - DNA, 263 bp, Sorghum bicolor
  unsure (1)..(263): unsure at all n locations
cgtccgcccttcttcctccgattgcccccaattccgacgcgtcatcgccgccatggccgccgcgggcaagctcctcctcctggccgccgccgtcctggcggcgtccctcgtcgcagacgcgcgcccgtgcggccacgcgcagacgctcctcgtttccttctcctccgtctccaggcccaacccggaccccagcaaccccacgccgntcaccaccaccgtngncaccgncctccgggtgcgncggctngggccgcaccagatcc

SEQ ID NO: 461407 - DNA, 145 bp, Sorghum bicolor
ccggtcgacccacctccgggacgcgtgggcgtggcgctcctcgggggcacgctccgcgccccgctcgcctctactagcgaaaattgcaccactctaaaatgaccgaagtacctcacgcgccacgctgcggggaaaagcccctgcc

SEQ ID NO: 461408 - DNA, 290 bp, Sorghum bicolor
cgtccggtcccaggttagtccttaattaatcagccttttgatcgaaattgacctattgtatgaaatgaatgatattagtaccacactaccactgctactaggtatagtagagaatgcttggatgagcttgtgaaagacagcaatctgtatgatttttttttctatttatttaatggcttagttgtggtgcatgctgtaactaaggagaaaaaatctgcaggttgagctttgggacattgcaagtggtagaaagatcgtaactttgccccaaacatgtagcactgatacgg

SEQ ID NO: 461409 - DNA, 252 bp, Sorghum bicolor
  unsure (1)..(252): unsure at all n locations
gccgcggtaccgtccgcatcccggtcgccccgcgtccgcccgcgtccgtcgagcaggaaatgcagaccgtgctcttcctcgcttggagaagtcctacgagcttccgacgacaagcatcaccatcggaacgagagatcagaggacccgaggccctttccaccctcattttgggtatggaggctgtggtgtccacgagaccacctaggctnctnatgaaggcgatgtcgacanagaaaggacctgacggaaacg

SEQ ID NO: 461410 - DNA, 255 bp, Sorghum bicolor
  unsure (1)..(255): unsure at all n locations
aggggggcaactaaaaaaactggcaggacatccccttaaagggggggggggaaaaaaaaaagaggcccgaaaaaaacgaacggccaaaaaaaaaaacacccggaaaggaaaaagggaatcgccaaggaggggcacacaaacgcggcgggagaggggggaacacgaaaagggaccgcggcaccccccagagacctagacccccaatgttgggggtttttaccccccttgcgnggaaaaaanaaacgaatgngacac

SEQ ID NO: 461411 - DNA, 444 bp, Sorghum bicolor
  unsure (1)..(444): unsure at all n locations
cgtccgcctagatgcagatgaatggtaaattcaagttcatggggctaggcagagtaactgaacagttaaaaaaatgtaatgctcatatgctttttcttccatatctcacttgtaactaaagtcataattatgctctgcttgtgccgtactaaatgaacctctagtccgtttgacatcagaatctagccagttgccattaactcatgggatcatgatagtgtctcttgaaacttatctgtgtatcttttgtttgtgtttacaatagtatttcttttcaacacaattgtgcttacatgtttattcgttaataaacttttgaagaccgtnctggcatattctaccagaaggacagggccaaatgggatgcatggaaggctggtgaaggttcatatacttatctgattggtgnattttgggccgcttatataattttggtatttacca

SEQ ID NO: 461412 - DNA, 305 bp, Sorghum bicolor
ccgaaaaaaaaaaaaaaaaaaaaaaaaaagggggaaggggaaaaaaaaaaaaaaaaaaaaaaaaaaaaaaaaaaaaaaaaaaaaaaaaaaaaaaaaaaaaaaaaaaaaaaaaaaaaaaaaaaaaaaaaaaaaaaggggggggcccttttaaagaatccaattttacttccccgtgcttgcaaatttttgggttttttttttggccccctaaattaattccccgggccgggtttttacaacgggggaattggaaaacccctgcgtttccccaatttaatgggtttgcaacaattccccttttgggg

SEQ ID NO: 461413 - DNA, 464 bp, Sorghum bicolor
cgtccggtgaacaagctcgacgctgaatcctccaagtcggcgttcgtgtcgtctgcgacggcgttggagaaatggattgcattagccggactgggtggtcagctcaaaggctactgatgtgacggaagcgttgtatgtatcatgtatggatccggcatttgtgaatctcctaaagagggtaccgtaaccgaggactgaattcagataagcgtgctagaataacacagcagcatcctcatcgatcaagaaactgggatcattttttgcgactgtgttattacagtaaatcagtaataggaaatgaagctgtattgttttttgttgtccggtgttacttttgaaattccaaacagctgatgggaagtttttatccaaaacttgctgcatgccgtgtgaatgtaacagggtcaagccgtgtcaactcttcaaaataaaaaaaaaatgggcgtccgcccttttttttt

SEQ ID NO: 461414 - DNA, 277 bp, Sorghum bicolor
  unsure (1)..(277): unsure at all n locations
cccggtcgccccgcgtccggcagcaggcaccacacacacagaatgccttgtcagctgccgcggcaataacatgaaagcgcttatccttattggggatttatgcatcttgcacggacccatctgaggggatgccacacaccctgtcgggacattgacttggacantgcgatgcctgggaccctcaggaccgagcctgctgtgaaaataaacagccaaacgacctgctgggggggatcctgatggcaattgccgctcactgggggagcataatggcgcc

SEQ ID NO: 461415 - DNA, 440 bp, Sorghum bicolor
cgtccgcccacgcgtccgggggaacagcacgagtacgaaggaagctgggcagcctttgccgttcaagagggaattctgaggcatcaaaagtctgtgctcaagagaaattggggcccttcagctacggaggaggattggtctgggtatcttaggcagattgaattgattcaagaaggtcactctgttacagaggaagagcactctgttacagagggacagcacatttctcgttcgcggtctttttcattggacgatatcacagtatctcctcggtagaaagcttcaattcgattatattcctcgttctattttctccatggtattacatgtgtagattggaagacaataacctatttgttctatttctgtttgggtgcatgcaacatacataaataccttacatagaacacacatcactctatacacaaataccttattac

SEQ ID NO: 461416 - DNA, 263 bp, Sorghum bicolor
  unsure (1)..(263): unsure at all n locations
cgtccgctccaccacacatcacgcacttcgcgccgcagcagaccaccacacatccatcgaagggggagggaggatgtggccgtcgacgacgtcgtggctcccgttcctgtacccgccgccggggtcggcgtacgtggcggcgatgtctgcggtgtcgctggtgtccatggcgaacgcgggcctcgccgagctccgcggcgaacacatggcctactccaagttctggcacgtngnggcgggcggnggnaacaacaacaagcggg

SEQ ID NO: 461417 - DNA, 424 bp, Sorghum bicolor
  unsure (1)..(424): unsure at all n locations
cgttccgaaaaaaaaaaaaaaaaaaaaaaaaaaaaaaaaaaaaaaaaaaaaaaaaaaaaaaaaaaaaaaaaaaaaaaaaaaaaaaaaaaaaaaaaaaaaaaaaaaaaaaaaaaaaaaaaaaaaaaaaaaaaaaaaaaaaaaaaaaaaaggggggggcctttttaaagattaaaattttttttccggttttttggaaattattattttttttttaggggaactaaatttaatttaatggggggggttttaaaaaagggggaattgaaaaaaccttgggtttacaaaattaattggttttgaaaaaaatcccttttttnaaagttggggaaaaaaaaaaaaggcccccccctttttttttttaaaaattttggccnncttaatgggnaaagggcncccccttttnnnnnnnttttttggggggggg

SEQ ID NO: 461418 - DNA, 207 bp, Sorghum bicolor
  unsure (1)..(207): unsure at all n locations
gcgtccgcacgccggtggacctgagcccactcccgtcccccccaaggctatgacgccctggcagccgcagccggccactggctcccaggtggcggcgcccgcgtgcatgacgcagaagcccccggtcagcggtgccatcatcggttatgccccgacaccgcangccgtgctggcgcccggggggggggggagggccatgcccgcgcc

SEQ ID NO: 461419 - DNA, 176 bp, Sorghum bicolor
cgtccgaatgaaggccaagggccgacgtgtgctaagaaaattcaataaatatgactaaaagaaattaaaataaaaaaaaataataaaaaaaaaaaaaaaaaaaaaacgtagacgaaaatgtgccgtaaaatatccaattgcgaatgcaatgactgaactagtacatgcttttttta

SEQ ID NO: 461420 - DNA, 319 bp, Sorghum bicolor
cgttccgaaaaaattaaaaaaaaaaaaaaaaaaggggaagggggaaaaaaaaaaaaaaaaaaaaaaaaaaaaaaaaaaaaaaaaaaaaaaaaaaaaaaagggggggcgtttttaagggtccaagttttttttacctttgtttgggaaggggtttttttttttttgggggaccttatttttttttattgggggggggtttaaaacttttttttatgggaaaaccttgggttttcccaatttaatgggtttgaaaaaaattccctttttaaaaactggggtaataaagaaaagggcccctccgatccccctttctttaaaa

SEQ ID NO: 461421 - DNA, 132 bp, Sorghum bicolor
cgtccgcgcggttcaacttcccctccgctcccacctccgccgcggtggcgccgccgccgccgccgccgccgccgccgccacctgcctccgtcaccgcccccgccgcggcgggggcggcgacggcgagccaca

SEQ ID NO: 461422 - DNA, 154 bp, Sorghum bicolor
cgtccgctcggcttgcaagatatggccacgctcatgtgtggaggcgtaactaagacgagaacctacttccatagctgaaatagaggtagccgatactgccctgatgagggctgcgaaaggaaggtcatgggcaagggacgggcccaggtgtgca

SEQ ID NO: 461423 - DNA, 92 bp, Sorghum bicolor
tcgccccgcgtccggaagtgggtcggggacggtggtgtaggtgcggtgggagttgtttctcagcgcgacaggaggaagagacgatttgggtt

SEQ ID NO: 461424 - DNA, 226 bp, Sorghum bicolor
cgtccgcacaaagttgggttttgtagggtaagagtgccgttttcatctttccggccagtaaacccacaggatcctccactggacccgtttcttgtccacacactaaccattaggtttgaaccaaagaagcagagacctggtgattcatctgaaggagctagtgaccaaagaaactttgagctcaaaatggagttcataaaagccttgccgagtggtcaagaaacag

SEQ ID NO: 461425 - DNA, 489 bp, Sorghum bicolor
  unsure (1)..(489): unsure at all n locations
cccgggtcgaggacgcgtccgtgatgctgcagtgctagactgccagtgctgcctagtgcgaggtactacggatcgcaatttgcgagtgcccaactcgagttgcagtaggaattgattccagtaggcgatagccgataggtaaacttcccaaagtttgtaacaaagagatgaggcagaatatgtcctctgtcacccttttcctccctatggtcataccaatggatggcgagcggacgagaatgtccgaggccctcgcacacaaggcgactaggcgagtaataattccacacgaaagctcactcccaacggcttaattttcgatcaatcgtgcctgttacatgaaaattgacaaccgcgccgcgcgcgccaactgatcagtcaaatcagnagcggctccagcacaatccggnccaatattatggggttnggtatgccaatcattcccgaatttctaanggaccgcatgccacgcacatttacaactggacc

SEQ ID NO: 461426 - DNA, 80 bp, Sorghum bicolor
gccaggttaggttgggaagccctttaaactgttgtcacttgcattttaccttttcatcgctgtttattgtgagtggtcct

SEQ ID NO: 461427 - DNA, 118 bp, Sorghum bicolor
  unsure (1)..(118): unsure at all n locations
cgtccgcggacgcgtgggcggagatgcagcccctcgcgccagcggggtaccgccgttcgccggagatgaaggagaaggtggaggcgnnngaggnnggacnggagggcggganngggga

SEQ ID NO: 461428 - DNA, 295 bp, Sorghum bicolor
ttccatgttacttctggaaaaactacttgttgagcttgttgtctttcctctattctgcatcatgcctacgtcagtctaactactattctgcatatgctgatatgctatatgagagaaaaacactgcttattgtctgcggcaatgtaatgcattgcacccgttgctggcgttgacatcagcttgccaccggttttcgaagcttgcaagtttggttaaaacatgttgaaagaatctgggcccatcaaaggacagatgttcttccaaaaaaaaaaaaaaaggggcggcggtctaaaag

SEQ ID NO: 461429 - DNA, 248 bp, Sorghum bicolor
  unsure (1)..(248): unsure at all n locations
ccgtcgcccgcgtccgtgctccccggcctccctcccccgctcctcgacggcagcctgcgggtgacatggcttcgacccgttgggcctggcggaggaccccgagaacctgggggttggcagggactggtgaacgggcggggcgatgtgggtggcggatgtgatccgagtgtgacaagcggctcataacgcccgatggtacacccgcagtggatcttgcgtcgcncacctgtctgatcatnatctgtcat

SEQ ID NO: 461430 - DNA, 301 bp, Sorghum bicolor
acccacgcgtccgaaaaaaaaaaaaaaaaaaaaaaaaaaaaaaagggcagagacaatccaaaagaaacacaaaataaaaaaaacaaaaaatgcaaacgaaaaaaaatataaatataaaagaaaaaaaaaaatagtacgcggccgcccgtttttcggcttccttgcctgtttccccctccttgcgcccttttttttttccttggggggccccttttttccgcccggggccctcttttctgcccggcgggccccggtcttccttcgcggttccccctttttttccctggcggccccttccccc

SEQ ID NO: 461431 - DNA, 182 bp, Sorghum bicolor
tttgggggggggggttctccccttttttccccccgggggaaaaagggggcccccccttgtgggcccctcacagggccctcttgggggtcccccccccggggggggggggcccccggttttcccccctctttagagattttttggggggggtttttcttgtggggggggagggcccccttttt

SEQ ID NO: 461432 - DNA, 562 bp, Sorghum bicolor
gtatcttttgctgtttggagattcttcaacaggcttcttactaaacttaaagatggaactgtcagtcaagcacatatttctgtgtcctccaaagttgatgagctatttatgatgatacaatatggttcaaggctccttcactggtggtctattgatgaagatagcaaagaggaacaggctcacttatgctatgcaaataatattggctatagtaccttttgcagttatccaccagaggtggtaaaagagatgccaaaggaagttcttgtcaaagaggtacagagacttcaactagccttggaagagcaaactgaaatggcaaatcatagccaacagcagtgtgatagtctaagaaatgaaaggatcttgtgtcgaatttgctttgaaagagacatatgcattgttatgcttccctgccgccatcatgttctctgcgagccctgctctaacaagtgtcagtcatgcccaatttgccgattgaccgttgagagcaggttatctgtttatgatacagtgatatcagccaatccattatgggatgcagtttaaaagttcacatgtc

SEQ ID NO: 461433 - DNA, 456 bp, Sorghum bicolor
  unsure (1)..(456): unsure at all n locations
cgtccggccgcgttaaagaatatatctgccaaaggattacctacactcgacgcaagtcttaagagtacctattgaagaaaaggaagaaatagaggtttaaagagatatgcaagttatgaagagtttcaagtgtatctaaacactgatgagtgcaagggaacctaaaggatttgggttcatccaatactttgatcctgaggatgcttctgatgcgaagtaccatatggatgggcagatgctgcttggaagggaaattactgttgtttttgcagaggaaaacaggaagaagccttctgacatgagggccagggaaagaatgagtggcagaagccgttcttatgatcggaggttgcgctcaaggtcacctggttacagtgattctcctaggggtagatcaaggtcgcacagcccaagccactcgcccgcacctaancnaaagcactattcaaggtcccc

SEQ ID NO: 461434 - DNA, 404 bp, Sorghum bicolor
ccgtccggcttttctttaggaagttcagcaaagccggcaaattcccaagtgttcaacctatgatgaatccatgaattcaccacaaccagtggcaccaccttttccagtggagttctccacctgtaaacggcttataaaggcatctgtacagatgcgacaataatgtctctatcaattttatctccaagaactatcactttgcagtacgagaattggctctcaagtcaacatttgtggcttgtgcttttgtcacattgctatgatttcgcatatcttgcggtctgcaatcctctggtactcgattggagatctctgcctagcgtggaaggcatccaagattgtgtgctggtgccagtatttgccaagaacctgctaggtgcatgctccacattattcgcaaggac

SEQ ID NO: 461435 - DNA, 164 bp, Sorghum bicolor
cgtccgcccagtgtccggcgactccagaaccttctcttcttccttgttcgttcatcccctaaccctttctttgttcatcttgttcttcctcttgtcgactcgtcgagatggccgggattggtccgatcaggcaggactgggagccggtggtggagctcaagaag

SEQ ID NO: 461436 - DNA, 191 bp, Sorghum bicolor
  unsure (1)..(191): unsure at all n locations
ccgggtcgttacttttttttatgtgttgagttagtgaattgttaccctcacaattaatgtgttatatgatggaggtgatttaagaattctttgggcattattaattgtcatcaatctgcagggatgggttanagaaaaaaacgaaaaatgaccctagtgaaactttgggggggactaaagatatccaaagg

SEQ ID NO: 461437 - DNA, 210 bp, Sorghum bicolor
tccgtgactgataaatcaattatctcgcacccacaaatttgatcagtacatgtgaagccttaaaaggtttcatgcaataggcacaagtggttttgtggtgcatggtcatgcagtgaaagaaaatggctgacagcgtgaggagctcggggcttggccagtttcttcagggcagagtatatgaagcaaagctgagtgtaactggacttcaag

SEQ ID NO: 461438 - DNA, 351 bp, Sorghum bicolor
  unsure (1)..(351): unsure at all n locations
ggaggtgggaaccctgttcgaggtgaagatggagagggactgaatggctcggagagctnttgaccttgaagaacgttcgaaaggcatacaagatgggcttacgtgactgaaatttgtgacgcttgaataccaggaggaagagctatccatcctccagcctcctcaaggtgatttttgagcatgccaaggataggcctatactttttctattttcacccgatgctgcacagctcatgcgtaattgcaaggacatatcctgttacttcctgacaacggagggacagacctatccccgactgagaaggactcgtggaggaggccgcagctttgcctccgagtggctgcaggaat

SEQ ID NO: 461439 - DNA, 280 bp, Sorghum bicolor
agctttcactctactctatattaccacagtctacttaatctgatcccttctacaacccattaaccaaggtttttgggaaaaaaaaccattaaccacaataccacatcaagttaggaattagtcacaggatgctagtaaatttcacacaatcaaaggcaataaaatcaccatacgagtaataattatccaattaatggataattgaaagtagtaagaatatatacatgccaccttttataatgtagatgaggagttcactcgtggcttttttttttttttt

SEQ ID NO: 461440 - DNA, 224 bp, Sorghum bicolor
acgccgtccgctcacaacttagccaccagataaaccaattgctggtaagcattttccataggtgcagacatgagactaatggtacactagtgttatcatggagctgttttgaacaccgaagctgctggttcacatttctttttttcccccctttgtgatttggatactatatttatcatgagttttcgtttattgagcaaatgaaacattacaagtttggcgaa

SEQ ID NO: 461441 - DNA, 308 bp, Sorghum bicolor
  unsure (1)..(308): unsure at all n locations
cgtcncgggatagaagcagcagctgcagggacagagtcatcgtcctcgaccctccccgtagctagcgcagcgaagccggcacaatgccaggcgccgccgtagcctcgcctctcctcctctcgctctcctcgtcctcctcccccttcctctcttcctcatccacctccttcctcccaccccactccgccgccgtcaggacgaagacggctgtctccgtcctccgtgcgctgcgcgccgaggcggccaccctccccgtgctctcattcaccggagagaaggtcggggaggtaaccctcgacctnaagtcc

SEQ ID NO: 461442 - DNA, 98 bp, Sorghum bicolor
acacccccatacaccccaacaccaaaccagaccaccaccaaaccagagcaaaagccaacaccaaccaacaacacccacaaccacaccacaaacacacc

SEQ ID NO: 461443 - DNA, 165 bp, Sorghum bicolor
  unsure (1)..(165): unsure at all n locations
gtccggagaccgccgctgaccgcgcgctacggctcaaggcgaaactcgcggcgcgcgggctccgcaccagcgtccatggcgtcctcctggtggagctgttcgatcacccgcacctgctgctgctgcaggtccggaactcctnctttctgctccccggnggccttt

SEQ ID NO: 461444 - DNA, 220 bp, Sorghum bicolor
  unsure (1)..(220): unsure at all n locations
cgtccgcccacgcgtccgcccacgcgtccgagacacccacagccgccgcgccttccagtactcgaggaagaggaacaccagcagcgccatggccacatcgaccgctgccgtgctgtccccgccgtccgtggccgggctccgcctggcgccgtccccccgccgggcggcgcgcgtggcgttccgcgcggggcgggcncggcngnccgnggcggcgcgcgcg

SEQ ID NO: 461445 - DNA, 71 bp, Sorghum bicolor
gtcgaccagcgtccgcagccctcaagcgacgaagccactgatcttttgtagtttggccaacctccaaagca

SEQ ID NO: 461446 - DNA, 206 bp, Sorghum bicolor
  unsure (1)..(206): unsure at all n locations
cgtccgatgagttcaaacagtttttgtgctcaggatttcaagaaacaaatatgctttacatagtgtgatgcttcatgcatgtgaacaggcttcagaagataagctaaaccatgtgtactctgacacttcccttcactaaaatatgcaaatatacagtttcgacttcctttttngtctttattttgccacagaaactacaatttatt

SEQ ID NO: 461447 - DNA, 311 bp, Sorghum bicolor
cgtccgcccacgcgtccgacctagctgagaagactgacatgggaagacttgcttctccttcattactgaaactagtatatgattctgcaaggccaaatggcaaaactagtgaggggagacttagtacagagatatggaatgaaatcgaacaactacttgagaaagtctcagtatggtttgccgatccttcaaaacttgcatgcttccttatcatggatcctaggagatcaatctctgtatcctctgcattacgatactggggttgtaccactcaagctggcggtcaaatatgtgggggatttggatatact

SEQ ID NO: 461448 - DNA, 150 bp, Sorghum bicolor
gtccgcgatagattgacagccaagcatggtggggattgtctggatggaccaagctaggagagaggaaaaactgtcacattcttctgctgtcacccttttaggaacgctcacatgacatgaagagttcacataaatgattctttttttgtt

SEQ ID NO: 461449 - DNA, 96 bp, Sorghum bicolor
  unsure (1)..(96): unsure at all n locations
ggtcgaccccgcgtccggacccggagcacgcgcaccggcacaagatcgaggaggagatcgcggcggcggcggccgtgggatccggcggcttcncct

SEQ ID NO: 461450 - DNA, 490 bp, Sorghum bicolor
  unsure (1)..(490): unsure at all n locations
aaaaaaaaaaaaaaaaaaaaaattaaaaaaaaaaaaaaaaaaaaaaaaaaaaaaaaaaaaagaaaaaaaaaaataaaaaaataccaaacataacaaacacaaacatacaaaaaaaataacatatatttaaaaataacataaatgggggcgccctttttaaggttcccaactttcctccccgtttcttcctggttttttttttttttttggggcccccaaatttcattccttggcccgggtttttccacccggggactggggaaccccttgcttttccccatttttttccctttggaacctttccctttttccccctttgggttaataaaaaaaggccccccccctttcccctttccaaaattttgcccccctttttggggaaggggccccccccttttaccgccctttttaccccggggggttggggggttccccccantttcccctttcttttttnccggcccttaccccccttttttttttttttttt

SEQ ID NO: 461451 - DNA, 217 bp, Sorghum bicolor
  unsure (1)..(217): unsure at all n locations
cgggacggatggtggaggttgcgtgtgggagttggtttgcgcagcgcgacaaggaggaagagaaggatttgggttcctgtaggagctagtagtcacagcagcaatcgtccggtcctccttggtgtgcaaggaagccaagggaacggaacggttctgaatgaagtgggagggggtnggccccggtggaagctggacgggcacgtttgctcttggccct

SEQ ID NO: 461452 - DNA, 75 bp, Sorghum bicolor
cccgcgtccgtactctgaagagcttggtatcaaaataccagaggggcatcagtatgagactgtcattcatgggag

SEQ ID NO: 461453 - DNA, 382 bp, Sorghum bicolor
  unsure (1)..(382): unsure at all n locations
cgtccgcctggcgaacgtgtggaaatatcgctcaatgagatgctctccaattctgaggaacacaggtattgcgaaagcccatatggaacatatatgatcgtttgtgctgcataccttctccaaagctgtctcatacccgggcagtatttttaatacttcatattcatacttcctcgttcaaaagggcgagacgttatggcttttctaggtcataggttttgcttcacacctagatatacattatgcctggatacatagaaaagctatgtatctaaaaagctagaacgacttaccatnntggaaaagggggaatcaagaaaccttttcaacatttttggtggtctttctcttacatatgtaggctggggnntaagggttgggt

SEQ ID NO: 461454 - DNA, 125 bp, Sorghum bicolor
cccggtcgaccacgcgtccgtggggaattgagaatccagctactgaccaagcagcagtgaaatcatttctgggtcaagtaaaaggagcaagagaaatgaatattgatagtttgcatatcatcatg

SEQ ID NO: 461455 - DNA, 69 bp, Sorghum bicolor
aacctttcttctcccggtctgatcgagtacataacttctggccctgttgcttgcatggcttgggagggg

SEQ ID NO: 461456 - DNA, 172 bp, Sorghum bicolor
ggggggggggggggggaactagaggagacgcccgcggagccccggccgagaacccggggacccccccgcctccgccagcgcgagacacacaagagccgagacggccagcaccaccaacgagccagaggagacacgggaccagtagaaggaggcacacagggctggaggaggc

SEQ ID NO: 461457 - DNA, 361 bp, Sorghum bicolor
  unsure (1)..(361): unsure at all n locations
cgtccgcccacgcgtccgcccagcgtccgcggacgcgtgggaaaaaaaaaaaaaaaaaaaaaaaaaaaaaaaaaaaaaaaaaaaaaaaaaaaaaaaaaaaaaaaaaaaaaaaaaaaaaaaaaaaaaaaaaaaaaaaaaaaaaaaaaaaaaaaaaaaaaaaaaaaaaaaaaaaaaaaaaaaaaaaananaanggggggggggnggttttaaaaaaaanaagntttnnnnngggggggttaaaanntttattttttttaaaagggnaaaaaaaaaaaatttgggggggggggttttaaaaaagtggaaaaagaaaaaaantttgggttaaaaaaataaannngttttaaaaaaaaatnttttt

SEQ ID NO: 461458 - DNA, 95 bp, Sorghum bicolor
  unsure (1)..(95): unsure at all n locations
ccggtcgaccccgcgtcccgcccgatgtcagcgctgggttctacactgccgtcaaccggaggatctctctnagggttgnaaacaanaaggccacc

SEQ ID NO: 461459 - DNA, 52 bp, Sorghum bicolor
  unsure (1)..(52): unsure at all n locations
gtcgaccagcgtncgtggtgccccatggcttaagtgcgggataagtacagcc

SEQ ID NO: 461460 - DNA, 121 bp, Sorghum bicolor
  unsure (1)..(121): unsure at all n locations
tcgacccacgcgtccgctgagaggagatgctatctgggttacacgagactgtgatcgtccggggtgtcaccgagaagggttcggaagcgctgctgaggagctngggaagnnacaagaggga

SEQ ID NO: 461461 - DNA, 211 bp, Sorghum bicolor
  unsure (1)..(211): unsure at all n locations
cgagttgcgggagcttattggcagcagactgcctgagtctccatttgggaggaatctggggaaaaccttgacttagatgacgaccccagaaatcaaagctcanaatgccacaattcaatctggtgcttttaacgcattattaacaagcagcnaccatttggggaccagaccgggcagncnnactgnntgaacgcctncaacccctaccacg

SEQ ID NO: 461462 - DNA, 69 bp, Sorghum bicolor
  unsure (1)..(69): unsure at all n locations
gcggcgggcagtaccctagcaccatgctgctgacggcggaccacgacgaccgcgtngtgccgtcncaca

SEQ ID NO: 461463 - DNA, 63 bp, Sorghum bicolor
  unsure (1)..(63): unsure at all n locations
gtccgggtgccaacttaggagctgctatagncatgtccaaccagggtgttgaagttttnccag

SEQ ID NO: 461464 - DNA, 100 bp, Sorghum bicolor
cgtccgtcgatctatcagcaaagcacccacaccagcgaaaaagcaagcagcgatggcggcctccatgatctcgccgtcagctctggtggcgccgccgtcc

SEQ ID NO: 461465 - DNA, 74 bp, Sorghum bicolor
cgtccgcgctgctgccgcggcggcagggtgccacatgctcaagctggcaccgacggtgaccgtggcggccgtgg

SEQ ID NO: 461466 - DNA, 404 bp, Sorghum bicolor
gtccgaaaaaaaaaaaaaaaaaaaagggcagagacgatataaaagagaaaaaaaattaaataaaaaatgaatgaaaaaaaataaaatataatataaagaaaaaataaattaaaattaaatgaaaaaaaatttaaaaattataaaaataaaaaaaaaaataaaattaaaaaaataaaaaaaaattaggggggggggcctttttaagatttccctttttttcccccggtttttgaaatttttttttttttttttggggccccttatttttattccgggggggggttttttaaaagggggggggggggaaaaccttggggtttcccaatttttttttttttggagatattccttttttggggggggggggggtataaaaaaggctccccccttttttcttttttaaa

SEQ ID NO: 461467 - DNA, 57 bp, Sorghum bicolor
  unsure (1)..(57): unsure at all n locations
ggggggggggattaatacacttncaacacatacccattttnaaaatttggggtaata

SEQ ID NO: 461468 - DNA, 318 bp, Sorghum bicolor
  unsure (1)..(318): unsure at all n locations
ccgtcccggcgaagcaccatagcagctaggaccagtccagcctctctctcttctcgtcttgtcttggcatccttgcctttgtctcaaggctagcaagcagcagctagctcgagactgcactgcacgccggcagagccaagctgtgagagcagagcggttcggtcgaacgagatgaagagccggaggcagagcagcgggggcagctcggccgcctgcgccgcgggggaggcgaacacgcacacgcacagcagcggcggcggggggggcaagcnggagaggaaggacgnggagaagaaccggaggcngcacangaagagc

SEQ ID NO: 461469 - DNA, 81 bp, Sorghum bicolor
gtccgcgcctcgtcactccactccttgagatttgagaaccacaagggccaccccccacccacccttcaaggacatggggga

SEQ ID NO: 461470 - DNA, 85 bp, Sorghum bicolor
acgcgtccgagaggtgggttggcttctcctccccctccggttcggttcggttcgggtcgggttcgtcaggttcttcggaggtttc

SEQ ID NO: 461471 - DNA, 279 bp, Sorghum bicolor
  unsure (1)..(279): unsure at all n locations
gtacgctgcagtactgtccgnatcctggtcgaccacgcgtccgtgatgaggagttccttgaaatcaatgatttctttgatctggatgatgtaggtcagaatgcaattgtacgacaactgagtacttgatctctgcaacaaatgggatgttgacaatttggaatactggagctccttcatttctgcctgggccatttgacacattggattggtagctgaaaatcaattttttgatattggtaacagtggaattcanaaccagagatatcaatatacaaca

SEQ ID NO: 461472 - DNA, 366 bp, Sorghum bicolor
  unsure (1)..(366): unsure at all n locations
gcgtccgcggcatactaacgaggcacgatttcatgcctgaacatatattgggccttcatcctttcctctttaagagcagatggaagaaggtgcgacttggcaaggtgaaagtcgccgacatattttgaagcttgctggtgactaatgatttggggaggtcacagaaggatcatctaatcaccgttgtatactttggcgtctcactccaaaaaatctcattgagcggaatcgtatattttgcagagaataactcaacttcaatactagtggactttagtcaaggaaaataatttcgttgtaaatgctaacangaggatggaacatactcagtagctgctaagngctaacaaggtnttttnccacgaa

SEQ ID NO: 461473 - DNA, 386 bp, Sorghum bicolor
cccggtcgaccagcgtccgccatttttcgcctaccaagcgcgtagcgaggagaaaacaagagaaaaaagcagcagcggccatggagggatacgaccgcgagttctaccagttcagcgaccagctgcggctgcagacggcgagcttctccggcctctccctcggcgactccatctggtcctccccctccgaggtgtggggcgagccggccttcgacggcgagtaccaccacttctcctccccctgcccctggaagaacgccatcgccaacatcaacggcgtcgccggaaacctggatggcccggacctcatcggctccggcaagctcgaatcctccgcgctcgtcagcctggccgacggcgacacctacccgggggatctggcccta

SEQ ID NO: 461474 - DNA, 106 bp, Sorghum bicolor
  unsure (1)..(106): unsure at all n locations
cgtccgcggacgcgtgggttaactggtactgctgtatgggtaagtaaaagaagatagaaggcacaaagagtgatatactnnaagaatgagttgaattaagnagaaa

SEQ ID NO: 461475 - DNA, 165 bp, Sorghum bicolor
gtccgccacgcgtccgaggctctataccgaacaaaaacactgtcacatacagttcgaccagtttggaatgataagtttgagtttgatgagatctctggtggtgaatatctgaagatcaaatgctataatgcagatatgtttggtgatgagagcattggtagtgca

SEQ ID NO: 461476 - DNA, 300 bp, Sorghum bicolor
  unsure (1)..(300): unsure at all n locations
tcccggtcgacccgcgtccgcgactcaagtgtcccccgctcttgccccatctcctcagatcggcttcctgtacaggcggagaggtcgagcacggtgtcaggcgcttgtggtgagaggttccttctcatctgtatcgcaagggccgctcacatcttcggtaagctcggcaggctcgccaagccatgcatcctctgtcttacggncttaatatgcgagtatgctgtctgtggggagatggncatccntccatgctnagatatgcacacgtnngatcatgcaaattatgaatggacctacata

SEQ ID NO: 461477 - DNA, 198 bp, Sorghum bicolor
  unsure (1)..(198): unsure at all n locations
cgtnccgaaaaaaaaaaaaaaaaaaaaaaaaaaaaaaaaaaaaaaaaaaaaaaaaaaaaaaaaaaaaaaaaaaaaaaaaaaaaaaaaaaaaaaaaaaaaaaaaaaaaaaaaaaaaaaaaaaaaaaaagggggggccgttttaaaggacccaattttacttccccgtgcttgcaacgtattattttttttttggggccc

SEQ ID NO: 461478 - DNA, 204 bp, Sorghum bicolor
  unsure (1)..(204): unsure at all n locations
cgcgtccgcccacgcgtccgcccacgcgtccgcccacgcgtggcgggacggctagggtgaactacccggaggtgccgcgtggtggggagaggagaacggtcaccatggctggccgccgaggccggccgcaccggcgcccgcaccggcgccgcaccgnccgcagttgcaattgttgtancaagagggggggggggggaacattta

SEQ ID NO: 461479 - DNA, 99 bp, Sorghum bicolor
  unsure (1)..(99): unsure at all n locations
cgtccgaactaaattataaatcgcaagaaaacgaaactaaaaaaaaaaaaaaaaaaaaaaaaaaaaaaaaaaaaaaaaaaaaaaaaaaaaangggggcg

SEQ ID NO: 461480 - DNA, 74 bp, Sorghum bicolor
  unsure (1)..(74): unsure at all n locations
acgcgtcctgcccgacctggtgcacgcgcagagcatcctggccatctgggcgtgccangtcnngctnatgggct

SEQ ID NO: 461481 - DNA, 125 bp, Sorghum bicolor
cgtccgcaccgttcaccagtttgctcctacatacaatgaatatgtgctctacaatcacaacgagggagacaatgcacaaacgaagtatcccttagggagcaccggcccaagggggcaggggggaa

SEQ ID NO: 461482 - DNA, 79 bp, Sorghum bicolor
  unsure (1)..(79): unsure at all n locations
ctttcacagaggaacagtgacccaacgaaagnctctcgcccttgggacatgggtcgtgatggttttgttatgggggaag

SEQ ID NO: 461483 - DNA, 445 bp, Sorghum bicolor
cgtccgccaatactccagctaaagatgaaaaacgagttaattggatctgattatctgagacatgactgttctgtccatattgtggatgttggcttcgtcctgctattatgctcccatcctctggagaatcagcaaataagctattccccttgccatacaagatgctaaattcccggtgcttctctagtctgccatcaatgtgagattcgtccagttggcagatcactgattcattcgctgacccctacgaatccaaatgtttgtgaaggcatagaagaactagaccaagtccttccacctaacgtagtaaactaccagtatatgtaatttttacctgcacattgtaccgtatgcatatacctatacaaatgtactatacccatcgtgtacatgtatatctccatcaccatgggcttattatgggcattaacaacatgtgtataac

SEQ ID NO: 461484 - DNA, 244 bp, Sorghum bicolor
cgcgtccgcccacgcgtccgcccacgcgtccgcccacgcgtccgcccacgcgtccgcccacgagtccgcccacgcgtccgcccacgcgtccgcccacgcgtccgcccacgcgtccgcccacgcgtccgcccacgcgtccgattcgtttctggatcacgcatgttgtgtaaccgagaaattggcgttcctgtggacaacatacatgatgaacttatatgctgaaatctaccgaaaatcctttgtg

SEQ ID NO: 461485 - DNA, 330 bp, Sorghum bicolor
  unsure (1)..(330): unsure at all n locations
ccggtcgaccccgcgtccgccatggaggacctggcgtcctacgcgacgcacccggcgcacgtggccgccgtgcagagccacgtcctccccaacgcgctcgacatcaccgccgtcgactgggtcaacgccgcgccgctcccgtcccccgcgggccccggcagcgccgtgcgcctcacgctggccaaggtgaaggaaggggtggaggtcncncanctcgtggagaaagtggccgccgtgaccaaggccgccggggacgccaagggcgccaaggtgagcttcggggagaacttntcccccgggcgggccaagggttaccagttcgggatgggg

SEQ ID NO: 461486 - DNA, 415 bp, Sorghum bicolor
aaaaaaaaaaaaaaaaaaaaaaaaaaaaaaaaaaaaaaaaaaaggaaaaaaaaaaaaagacagacacaatctaaaagagatccaagcttacgtacacatacaatgaaacaaaataactctgtgggggggcgccccttaaaggcccttcctttacctcccctttcctccgccttaattgttttttttttggcgcccccaaatttagtggcctgcccgccctttcccctttcgggggctggaaaaccctcggggtgccccactttaatcgctctgcccaacattcccttttcctaattggggaatagaacaaacggtcccccccctctttcttttcccaacatttgcccggctcaatggggaaggggccccccccttttcccgccctattacccccgccggtgggggggttccctcc

SEQ ID NO: 461487 - DNA, 118 bp, Sorghum bicolor
  unsure (1)..(118): unsure at all n locations
gtccgaattcccggtcgccccgcgtccgngngctccaccgccgatccgccgggctgacatcgccaacgaagagcggatcccgtggcgaggaggaggaggaggaggaggaggaggtggt

SEQ ID NO: 461488 - DNA, 571 bp, Sorghum bicolor
gcgtccgcggacgcgtgggtgagtgtcttagttcaaacattcaatctgaaacaaaacaaaatgatacactcccatctgcctgcaggtttaaatttgaagatattacagcttcatctttggtgttggttctgaaggaagctgtttcctcacagtatcatactatcaaaggctataaactctggtactggaatagcagagaagcaccttacacaggggagcctgctgttttccccaaagaccaaagaaggattcttatatccaatctgcagccctgcacagagtactccttccgcattatttcatttactgaggatggtgaactgggccattctgaatcgaagatctttaccaagagtgtggaaattattcataagaacacagagcatggagcagaaggttgctcatcttctgccaaaagagttggtaagagacaaaatgttaggtcattaggcttccaggtgcgtcagctgggtaatgtattccgaaaagcacaaactgaggaaaatggttaccccaatgcactgtgtaaagatgagattgaagattcatgtgatcagagtgattctttgat

SEQ ID NO: 461489 - DNA, 265 bp, Sorghum bicolor
cgtccgcaactggtaataattggagcttgtggagatgacacgccagggcgttttgtttgtcagcaacatgagctttagtggagtagacctcacaagattaaggacaaaaaaggggcacactgctcagtgtgcatgcttggtcgatgcaagtggcaatcgcaccatgcgcccttgcctatctagtgcaggggagctccaggccaacgagttcaaaaaggaggacttcaaaggctccaagtgctctgctgtacgatatgcaagacag

SEQ ID NO: 461490 - DNA, 54 bp, Sorghum bicolor
cgcgtccggtgtgtttcctccgtcccaaaataagtcttcatctcgtattttgag

SEQ ID NO: 461491 - DNA, 376 bp, Sorghum bicolor
gggggggtcccttgcccccccaaaaatagggggttttttccattttttgggggaataaaaaaaaaaaaagggggggtttttaaaaaaataacccccccttttgtggggggcccctttttgttttttttgggggaaaaggggagaaaattttctcttcagggggggggttttttggggggggccccccttttttttttcccaaaaaaatatattaaaaaaaaattttgtggggggggggggggtttttttcttctttttgtgggggggggggggggcaaccccctttttttttttttttttataaaaaaaaaaaaaatttttttttttggcgggggggggtgttttttgctccctccaaaaagaagggggggggggg

SEQ ID NO: 461492 - DNA, 567 bp, Sorghum bicolor
gtccgccatgtagggctacacacctgcacatggtgcctgacatgtacaacaatggcggcctcgccacggacgcctaccagtaccagacgtgccatggcggcacaatgcagcacggctacgtcttcccgtgcgcacgcgccagttttagttacttcattatgccttatgttttttcatattttggggggggggggtctttttctttttctattttcttttctctttgatcttatttgcttttattccgtctttctccttttctcttttttttcctgcccgttatatttttcttcctttttctttctctttatttttttctttcttcctttttttttactttatcctttttttttttcttttttgttttatcttttcttattcttcttttttctctttgctttttcatacttctttcttttttccttgattttcttgttattttcttacccttttctcttttttttttttctcttctttttttccttctcttctttttttttccctctctctttctctccctttccttttttctttcttttttttttatttcttttttttccctttttt

SEQ ID NO: 461493 - DNA, 500 bp, Sorghum bicolor
acgcgtccggcctgaagccgaagtaataccgaatgttttttttctcctgtgtctcaggttactgcgcatgaaatcatgctgtggtgcatcaaagatgcacaggacctcatcaggaagaccccgcctcccccactccctggatctgatctcacgaagctccttgcggagtatgagaccctttccaagtgcgcagagaccgagtctatcgagatctttgctggaactggcaacttccttaagcttcaggtgaagacctggcaaaattatggtgaaactgtcaagggaggtgggatcgaagctgcacaggatgtcacctgcaccgttcgttcagcatgtgtggatcatgtgatccgccatcgcctactctccaggtttggattgaagatggacaatatgccagaggaccccattgagcatgacatggctgcagctatgatgtatagcgcagacttcaccaaggaccgtcgcgggagatacagaagggagctgaaatggattga

SEQ ID NO: 461494 - DNA, 446 bp, Sorghum bicolor
ccgtccgaaaaaaaaaaaaaaaaaaaaaaaaaaaaaaaaaaaaaaaaaaaaaaaaaaaaaaaaaaaaaaaaaaaaaagaaaaaacaatttaaaaactccaaaaatacaaaaatcttacttacacatggggggccccttctttaaggggcccctattttccctccccttccttcccttttactatttttttttttggggggcccttaaattctttccagttgcccccctttttccccctttgggcttggaccacctttcgctttccccattttacccccttagcaccccccccctttttctcccgctgggttaataccaattggcccccccccgtccccccttcccttaagtgcgccccccttggtggttattggcccccccccttttccgctcctttacccccgggggttttgggtttccctcccttgccttcctttctctttgcc

SEQ ID NO: 461495 - DNA, 248 bp, Sorghum bicolor
  unsure (1)..(248): unsure at all n locations
gcggtccgtccgnatcccggtcgaccacgcgtccggcacgctccgcgacgcgatggccgcgctccgcctcgcctccttcaccctccgacccgccgccgccgccgcggcgtccgcctcctccggcgcgacccccgcggcgccccggtccgcctccttcgcccgcgcggcgcgggggctaccctccctccgcctggccccgccccgccgccgcggggacctcgncaggccccgcgccgaggcagcggcgg

SEQ ID NO: 461496 - DNA, 444 bp, Sorghum bicolor
cgtccgttgggttctctgccgccttcattacggtccgaaaattacagtccccaggagcctcaggtgggcgtcatgcggagcgatctcaatgagcttaacatcagccctgcttgtgcggtctttcagcccagagtgcgaacctcagaatattatagctgcttacgacaaacctcaacgcaagactgaataacatcaacagggtgtcaggccactgctactctccctatcaaattattttggttgtttgattcagttcagtcgaggatatacttgtatgtccctttgtatgatactacgtatttatgcatcataatatctccctgttgagtgaagaactatttgcctttatgtttggcactatatgcaaaccaccatggatttgggtctgagatgtactgtctataatcaatattgatactatgttacagttacactacttgaaaa

SEQ ID NO: 461497 - DNA, 432 bp, Sorghum bicolor
cgtccgcccttcccgtgtccgctgatgggagggagacaccgcagtccaataaagtgcggagcgtcgtcgggaggctcgccgtccaagcggcccaaaggggtttgagggtatacctgcaggatgaatatggaacgtccacggacgccctagagtacatgatctccaggggtgtcaagaagtctgcccgtgatacccaatctgatgcatatgctgctgtgatgattttgaagagatatttcacgtcatcaggtcaaggggctaagattgttctccccaggcaaccagaattacaggacaagttaatagttcagtctaggcaagatgctgaaatttagaaaggcatgtcttctagtttctccatcagtagagaacatgtccagttgagagcacctcattttctataccatctcatccgctgtgatgtagatgatt

SEQ ID NO: 461498 - DNA, 420 bp, Sorghum bicolor
  unsure (1)..(420): unsure at all n locations
cgtccgattgagatttccctgcagctttatactgatacaatacaatgatgatttcgaagttggttctttgtatgaattagtgtcagctgcatagtgcctgtcagttatgttcttccatgttgggaaattctcaaaagaaagcaaaagcgtgcccaactgtgtggattttggaatttgaagcctgtggctgtcaatttcttgtgttataagatgttagtgtaatctggttgtggagattcatattatctgtcctcatccttgtacttctgttatctgttaaaaagttctatatgacagaccctataaattatttgttccaacttttttgcaaaactttaaacaattgctgcaacctcggtttcctacaccctagcgcataggtctcatcaataaaatatactntaggtctcatcantnaaa

SEQ ID NO: 461499 - DNA, 323 bp, Sorghum bicolor
  unsure (1)..(323): unsure at all n locations
tttttttttttttgttgccggggcccccccttttttgggggggccccaacggtttttttttttccccccctttttttttttccccggntttttttttttttttttttttttggggccccctctaaaaaattttttttttttccgcggccccccctttttataaaaaaaaaccgcggggggtgggggaaaaaaaaaccccggggtttttaaaaaaaaaaaaaaaaaaattttttttggaaaaaaaaaaaccttttttttttttaaaaaaaggggtgggaaaaaaaaaaaaaaaaaaaaaaacccaaaaaaaaccccccttttct

SEQ ID NO: 461500 - DNA, 423 bp, Sorghum bicolor
  unsure (1)..(423): unsure at all n locations
cgtccgcgattcagaaaccctcgcctccctcttccttgccggccgccgcctccctcctcgtcctcttcctcgccgccgccgccgccggcggaacccgcccgccggagggagaagggatgggtgccaatggggatgaagcgtcgcggataatcgtaccgatggcggtggaggggaccccggagcagctggcgttcgtccaggagtcgaagctgcagaagcgcaaggagaacgtggactgggccgtcaggaaccgggagcgcaaggcggccaagcgccagcgcatccgcgacgagcacaaggtcgtcgtcaagcggcccgaggatttcgtcaccgcgttccgcaacaaggagcgcgactttctgcggatgaggacccgcctcaaggtccgcaagcagccgcccgncgaggcgctcagctccaagc

SEQ ID NO: 461501 - DNA, 375 bp, Sorghum bicolor
  unsure (1)..(375): unsure at all n locations
cccgggntcgacccactgcgtcctgattttttttttttttttttttttttaaaaaaaaaaaaaaaaaaaaaaaaaaaaaaaaaaaaaaaaaaaaaaaaaaaaaaaaaaaaaaaaaaaaaaaaaaaaaaaaaaaaaaaaaaaaaaaaaaaaaaaaaaaaaaaaaaaaaaaaaaaaaaaaaaaaaaaaaaaaaaaaaaggggggggtggtttttaaaaattaaaaattttnnnnngggggtttggaaaataaaatttttttttttggggaaataaatttaaaataaatggggggtttttaaaaaaagggggagggaaaaaaantttgttttaaaaaaattatttnttttaaaaaaaattnnttttttgggggttggg

SEQ ID NO: 461502 - DNA, 150 bp, Sorghum bicolor
  unsure (1)..(150): unsure at all n locations
cccanacaatcttcgttttcaggtcttgtttagttccgaaatttttttaatttttaatattgtaacactttcttttttatttgacaaatattgnncaattataaattaactanattnaaaaaatttattttatnatttaattgggggggg

SEQ ID NO: 461503 - DNA, 438 bp, Sorghum bicolor
cgtccgatcctatgtaagatattagtgtttcgtgcatatgcacccgcagcccatcataatagatcacgcacatgtagcggtatgccacacgacctgatgatagattcgatggctactacattagtctcttgcctctctgttgttgctgttggactggcttctccctgaggctgtgaaccaggagtagtctgctgcaggggcagagtcgaactcacaaccaacaaaccctcagacgggggcctggggacgaggaaacatttgattgaacgacccgttatttctggtgaggaagagctgggccgagggctcgcttacattgtttgttgggaccggaacttgatggcagcaatttgcggctactttccacaggatgcctaggagctcgcagggtctgtctatgggcctgttgagtgcaattgggatggatacttattttta

SEQ ID NO: 461504 - DNA, 137 bp, Sorghum bicolor
  unsure (1)..(137): unsure at all n locations
cgtccggcttctggagcgtggagctggcgtaccagcgcctccccggcgtggccggcacggaggtcgggtactcgcagggccactgccacgccccgacctaccgcgacgnctgcggcggcggcccgggccaacgccgg

SEQ ID NO: 461505 - DNA, 413 bp, Sorghum bicolor
  unsure (1)..(413): unsure at all n locations
cgtccggagcaaactcaccgagatggccgagtttttccacgccggcaggaccaacaccgacgactgctacgacgccggcaagcacgtgcacggcagcaggagggtgtacggacacgacgacgcgagccgcagtaggccagcgtacgccgacgactgctacaacggcggcgagctgggcgccctcgccgccggcgccgcctccgcctccgcctccgcactgaaggagcagaaggaggccaagcagcgcagcagggcgcacgacagccacttctgtcaccactagagatcgtcgatccgatgaactattcatggcctgcatgcatcgtcttcctgctggctgctgaggctgtgagcttgnancgtgtgccatgcaatatgcatggnancncncatatatattgtgccatntacct

SEQ ID NO: 461506 - DNA, 260 bp, Sorghum bicolor
ggcgacacccacccgccggcccactcatagctagaacagaatctatgaaggagcgcgaggcctacacccagaggattccagtcttcatctctcttgttggctcgccataccaaggatcaagaacacgccaatgctggggagccaaccaggtacgcatgcgcgcaatatcgcggctatgcgccatgtgcttgcactctctatagcctcatcaactgatgttgcatacagcagagatttgtatatcttgtctaaatgccgct

SEQ ID NO: 461507 - DNA, 236 bp, Sorghum bicolor
ttttgttacagtaccgaaaacttttaactaaacaaggccatagttgaactttgtacaaggcacaaagccatatcccgaatctagttaccagaactgccaaattacacatgaacattatatcaggtttgcaatatcgaatgcaacagaatatattcacctctctgccggtggaagtcagatatatcaccttggtgtgaaatacatgagacaaaactggaacattgcatttgtgtaca

SEQ ID NO: 461508 - DNA, 355 bp, Sorghum bicolor
cgtccgattataagttgtgagcgagcttggagaagttccatttgctcaggaaagtagccttcacttcaggttgtgacgtaagtttaggtttcagagtaatcgaatagaccagtgaaatctgccttatgtgggtcatttaatatagcacccacctgatgatattataatagactatgcatgtacgtacctatactgttgtaactctgtgcagtgttgaaactggtggtcatggggcattttagtttttaacatttatctgctccagcgaagaagaccattgtgggcgtagtttttagcctgagaagaagacctttggtgagcgggcaggcacatttgcattcctaccagtctagca

SEQ ID NO: 461509 - DNA, 392 bp, Sorghum bicolor
cgtccgcggcaatcttggagccactagaagagagcgtgcctgaagaaaatggactcgcatcagctgaagatgacgaagatgattcttctgatactgaaaataatgatgaacttgtgcctgccgattctacgccgaagctggacctgcaaagtgacaagaagaaaggaattcaagtccagcttgacctgaagagcaatgggaatggctctagtgggaagaaggcgcctgccgccagatcaagagcgactgggtccagtgggaaggccgctgcgggaggctcggctgggaagaggaagaggtaactgagacattggccaccgcccacagttggccagcgactagtttggacagatcccttggtaaatagggagcagggcgaggttcaaagtttt

SEQ ID NO: 461510 - DNA, 339 bp, Sorghum bicolor
  unsure (1)..(339): unsure at all n locations
cgtccgcggacgcgtgggttcagagcaagggagcgagctatatgaacttgtggctcatctgccagacaaggccaacaactacctggcgccggcgctctcggtcctggagaagaacacctgatctcatcagtgagccagtgacctgtgaggtgcactaggaattatccatgtacacggtgctgtgtggtgtgaatattgcataccaccgactcctcttgtacgcataggaacactacattaatatacacacacagcattgtgttgggttatttggagagagtaggtgaggtaggaatttnctatgtncatacatgtnagttttttnttttnaatgtgaag

SEQ ID NO: 461511 - DNA, 361 bp, Sorghum bicolor
tcgccccgcgtccgggaattggcctatcttatcacgtgttgaacagaaagatggaatgccaagcatgcacaattagtgacagcgccactgctgacactggtgattctcatacatgtggcattggtgcggagactcacctatatggaacagctagagcaggggtcgcctcttatgaggaacatactgaaaaggggggtcgtgagtcaactggttacaggatatcttacgagggttattcttcattagatctcgggacatgtgccgtccataatgaacctattttggactatgcacggatttgtttactgatagggggattgagcgaagcgtgtgcaaaaagatgctgtggtctacaatatgg

SEQ ID NO: 461512 - DNA, 364 bp, Sorghum bicolor
  unsure (1)..(364): unsure at all n locations
cgtccgctggtatctactgctagtagcctagtgagctcgtctccaggtggatgccatgcacggttattttgaaggtgggcagaggcaactggacagttaggggtcatcactaagcagtgaaagcattgtacactactccgtataggtcggatagcttgaccttacacactccctgttaggatctggcgatttttcatgcctgatgtagttgttcttcctggatagtaatgaggactaatgtaattgatcgtgtggtgttagcatgccgtgttnataagatttgtttancatgctgatgtgtagtgttagttgaactacactggcgnangtaccggaacaatgtaattggaacgggagctttgtg

SEQ ID NO: 461513 - DNA, 382 bp, Sorghum bicolor
gcgtccgcggacgctgtgggaaaaaaaaaaaaaaaaaaaaaaaaaaaaaaaaaaaaaaaaaaaaaaaaaaaaaaaaaaaaaaaaaaaaaaaaagggcggacagttttaaaggatccaaactttacatgggcgggccttctttaaaggtgcctgttttatttgggcgtccaagccatttctattgttttttttgggggcccctattttcttttaaatccccggcttttcccaacttgggggctgggaaacccttgggttttcggaaattattgggtttgcccaaaatgccctttttgttggctgttgtaattttaaaagggccctgactgttcaactttccccccctttttgcgctttattatagtatgggggcccccttttt

SEQ ID NO: 461514 - DNA, 322 bp, Sorghum bicolor
  unsure (1)..(322): unsure at all n locations
gtccgnactccccggtcgaccccgcgtccgcggacgcgtgggcggatttgggcgttcctctcttacgcgtggtgggttcgtcggagttttggtcaaattctgcaacggagctgttggatttgggaggagtatgattngtgctgntncagtgaggaacccaccacagccagcacgccaggctcctcctccagctcctgttcgggatggtggtggctccattcttggaggaattgggtccaccattgctcaaggtatggcatttggtactggtagtgccatggcgcacagggctggtgattgctgaatgggtccncggaccatt

SEQ ID NO: 461515 - DNA, 361 bp, Sorghum bicolor
  unsure (1)..(361): unsure at all n locations
cgcgtccggaagcggtctacatctgttgaatcaaagatcagcatttggctcaagctctctctctcttttattcccaatataatattgataaatgtgttggccttccaggcatgcggtgccaggcttcgatcaggtagtatggttttctacgcatcctaggacttctcggcgttcgtctgcagacgtgagggaggagctgtgcaagaggatacaataattgtcatgagcttgcgatatactttctttctcgaacgagaacttgtgatataccctgatatatccctccgtgctgaattgtaagatgatttaactttttttagatatatacaaatttgttatggccaaaaaaaaaaaaanaaaa

SEQ ID NO: 461516 - DNA, 283 bp, Sorghum bicolor
  unsure (1)..(283): unsure at all n locations
cgtccgctcctcccatggttttctccgtgatccaaccgggccgcttctccaacagcttggttcagtctgatttcatcgcaaagattcttgggcgctccgaagctcctctgacctacaggcgcacgaaggccggctacccggacaagttcggcgtcaacttcgccgtgggcggcgccggcgtcttcgaggtgccgcgcgaggcgccgacgctcgccagacagatcgacgactnngagaagatgcncgacgacnacaggaccatngggaaatggcagctcaggca

SEQ ID NO: 461517 - DNA, 165 bp, Sorghum bicolor
  unsure (1)..(165): unsure at all n locations
cgtccgacaaaggtgggccgtcacaagaaaacacacacacacacacacaaggcaacagtctccattctccacaccacacgaccaccanctcaactcanctctcactaaaccccattcacttttttataataaaactccctccattcatcttncttaactataatt

SEQ ID NO: 461518 - DNA, 334 bp, Sorghum bicolor
cgtccgccagaccaacccaaatctttcctgtggcctgtttgatgctacaatggaagataaaacctcatttgacgagtgccatggaaatgctgaggtgatgcaaatcatcactcatttacagatgagaactgaagcattggagaagaagctgattgggtcagatagagaaatactttcgttgagggaagtagttaaagactcaggaagaaaagttcagcaactggaataccttgtagatgagttacaattcaaatttgactcttcgctgtctcttcttggaagcatgtgcaatactctagccaagccatcaatattcctgattggtggttataat

SEQ ID NO: 461519 - DNA, 506 bp, Sorghum bicolor
ccgtccgcccacgcgtccgtatgctcacgagaatcacaaggcttatgttaccatctctctactgaggacatggtctaactcttaacaatggtgctttcgctgtccctggatgaaactaggttgaatgctgaagcactgattgtcacttaagaagatgcatgttaatttgtcacacctaacttggatcttttgtcccagttgttacttatccattttgatgttcaattatcagtaggacttcaattaaacagatgaatgtgttcattaaaacttttttcttcactttccaaaaacaggtggtcattcctcttcaccagctaagagcagctaatccttcagtaagcaaagtaaattctgctgagaagtacattcaggtcgtttctgttgaaggccatgagttctggttcatgggttttctaatgtacgacaaggctgcagccagtcttcaagaagccttggctactgctcgtgagttgcaaccgtaaaggcaccaagtggtgtttttt

SEQ ID NO: 461520 - DNA, 279 bp, Sorghum bicolor
  unsure (1)..(279): unsure at all n locations
tgcgtccgcccatgcgtccgatgagtacattatgtaaagagatgtgcagttgtgcttgtaagccaaaaaaaaaaaaaaaaaaaaaaaaaaaaaaaaaaaaaaaaaaaaaaaaaaaaaaaaaaaaaaaaaaatagggggaaaggtgtaaaggaaagaagaaaaagaaaaaagggagtgcgaaaaaaaaaagtgtgggttgtgtggatttttaattaatttaattgggagggggttttttgtgatagggtttgtgtaattgttgtggttncttattttaat

SEQ ID NO: 461521 - DNA, 131 bp, Sorghum bicolor
tcccggtcgccccgctccgtatttttttttaaaatttaaaagggcaaaaataaaattaaattatataaaaatattttaaattaatatattaaaaaaaaaaaaatagggggggttttgttttttattttttt

SEQ ID NO: 461522 - DNA, 198 bp, Sorghum bicolor
cctgcagtccgtccgatccggtcgacacgcgcgaaagagatggaggcctgggccgatggccggctgaccacgcgccagccgccaggggcttcgcatggcggccaagcgctgccagggcgaccagactcggcggcatgtctggagctcccggacgcgagcagggtcgtgcggcaactcggggggtgggggcggctgggg

SEQ ID NO: 461523 - DNA, 375 bp, Sorghum bicolor
cgtccggaacgcccagctctgggcggcgccgccggcgatagccgcctgaagggaagacgaggagggaagtgaggcccgaaaaccaaagcctaggatccgttctggttggctatggctgcgcagctggagctggagaggtgcacgtacgcaccacggcacccgtgacgcgtgtggggcactggcggccacggccggccagagcacgctgggccagcgcgagactgtgagcctgcgctgggtgtgtctcctcgaccagaatgcgtccaccgtgtgtccgtgtcatggcacttgaatgcggctttggttttttcctgtggtcggcttgtgaccctctcctctacttggttgctggggttggcgccatgcgaggtgaat

SEQ ID NO: 461524 - DNA, 388 bp, Sorghum bicolor
  unsure (1)..(388): unsure at all n locations
ccggtcgaccccgcgtccggacgagggcttgtcagatgatgatgcagaaaacgaaggtttccggaaatgtgagtgtgtgattcagtagatttcatgtctgcacaacaagcctgacagaaacatctcctcatggtaagcctgtgtcctgcttgaaaggatgtgccgcaccggtgacttctttgcaactgaaatgatcgacgacagtcgaaacaaagcaaacagtgacaagtcgatattgtgctagattatttgttggttctatgnttaactagtcagcagggttatagtttcgaagcccacctgtacaatatcaatatctcctttctttcttttctggtcattttgttttctggctttccattggggtttcacgcccgctgtaccatat

SEQ ID NO: 461525 - DNA, 290 bp, Sorghum bicolor
  unsure (1)..(290): unsure at all n locations
cgtccgcccacgcgtccgcccacgcgtccggattaattggttacacacgagttgaaaatcgtaactggtgaaaccaaacaagcatggtgaagaaagttaaatcggacgcagagtaactgacaattcaacgaacaggcgcggcagtcaaatgggcttctgctctcacctgcttgaagatagcgtcggagctgagggggctctccttggctttccggtggacaggcgccgcggcgcggaacgtgaaagcggaaaagtcccctgccccgccccggccgccgncggcggnggac

SEQ ID NO: 461526 - DNA, 352 bp, Sorghum bicolor
  unsure (1)..(352): unsure at all n locations
cgtccgaaatccggtcgaccacgcgtccgcaaactggaaggagcaatgaggattttgagttcaagctcttctgacgaggctactactcaaaagagcttgaactcggcctttgcttgttggtgatgctcatatgtaatgttccttgttcgcagaaaatttgctttgatataaagacaatgttagttgacatttccttatacaagtcatgtagctgtgatattcttctctctaacttggtgccatatggactggagtcaccgatgtaccaagtgtctgcaacaaccgttgaacacatggagagatgctctccatatctttagaagattatgataagaagattcngtgattcctg

SEQ ID NO: 461527 - DNA, 425 bp, Sorghum bicolor
cgtccgcggaaacgcgcgacatctgtggagagacttcctgtccagcaactggtgacttcgttctatctcatcagcagacgttaccaggattcactccaccgggctcgtacacgatctacatgaagatacttggtgacgaaaacgaggaactgagctgcatctcgttcgggttcagcattgggttcgtcgcctccagctgaacgcgtccgagctgagcaccacaagtagcccatggatgatgtaattatgtaaaaccactctgtatcctataactcccagccccagtgtcgaggtccatgtacgctttgtgggtgtcgcgctactgtcttgtgtcgttgtgttcaactaagacgttttatccagagttgaacatcacaataaaaacagagtctgatatcatgtaatgaaagtctgcgttcttggtg

SEQ ID NO: 461528 - DNA, 119 bp, Sorghum bicolor
cgcgtccgccccgcgtccgcccacgcgtccgcccacgcgtccgcccacgcgtccgaaaaaaaaaaaaaaaaaaaaaaaaaaaaaggaaaaaaaaatataaaggataaaaggtttagggg

SEQ ID NO: 461529 - DNA, 144 bp, Sorghum bicolor
  unsure (1)..(144): unsure at all n locations
gacgccccctgaaacggccccttttgcgccgggggggtggaggaaaaaggcccccccccctccccctttcaaaaagtgggacacccggatgggggaatgggccccccccctttnggggncatattagcgggggggggggggggg

SEQ ID NO: 461530 - DNA, 354 bp, Sorghum bicolor
gcgtccgcggagaggaagtgcgcggtgccgggcggcggctgcgaacgcggaggcggcagcttccaccaatcagtgcagcctcatcctcaaaggctgttccagcagcatggaaaaagtctacgccgtcaacagtcctcataagaaaagaaaatcacagtatgagctgagtgatccaaagttggtaccacttaaatgcaagtttcgcaaacggttatcttgccacgatgatgagtctgcaaccacagaaagtttaggatatgattgcattttcatgaacaagacctctgggacggacatggtcagcatacctgaagaattggactcttgggagaacactatgagcctatttggtgg

SEQ ID NO: 461531 - DNA, 378 bp, Sorghum bicolor
  unsure (1)..(378): unsure at all n locations
cgtccggagggcttgctagcttttaattgtatccatctctgttccacagtantgctggaagacaacagcataactgggacaatccctgcagagattggcaagcttagcgggctcaagaaactcgatctctccagcaaccacttgtatggtgaaatcccttcctctctgttctaccttgaaagcctccggtacatgtgagtgagcgctgatgcatatacgccaattctatcttgttgcgttctttaggtagctgcaacattttggtttaatttgtactcggtgtgcttgcgcttgtgtcttccagaaacctgtcctataataacttgagcggaccgatacccaaatcgtttgcagggacactctagtaaggatataatt

SEQ ID NO: 461532 - DNA, 405 bp, Sorghum bicolor
  unsure (1)..(405): unsure at all n locations
cgcgtccgcgctacagaggttgacggagaaccatattggtattatgagtatcttgttcggaaatcaccaacaaaatctgcaccagaaccaaatttgtttcgacacaatgtagcctgcactgctgagcgtgatgggttcctgtactcactgaatgcttccacccttagcaaacagtgggaatctatggggccctttctacaacagactgtggcatcctttcgccttctcccccctacagaaaactatgttcctccctacaaggatccttggagattttggtgaatggagattctttttgtagttcccattttttctcttcagatgacattatagcttcaggttntaaaccattttttcacaccanatccttantgagtgcctgtccttttagcttgacngatgaaa

SEQ ID NO: 461533 - DNA, 148 bp, Sorghum bicolor
  unsure (1)..(148): unsure at all n locations
cgtccgcggacgcgtgggcgccgccaacgccggtgactacgtcatcgtcgcggacatgcacgccagggccaagaattgggccgctgccgccgcgttccggacagaggcggnggactggggcctcgcgcagncccccgggnncngcgcc

SEQ ID NO: 461534 - DNA, 371 bp, Sorghum bicolor
cgtccggccacgagggactaatgatggacttgaggccatgaacctctggtggtaaaacgggtggatatgctagcgaatggctgaactcccctttaagtacccttttactttttgacatgcatcaaagacaggtgttgcatcaagcagaaggaactgatactctatctgcggtgcctatttattagacaatgatgtattcagaccattttggtacgaggcttgtaagctgtgtttgtcctgttattgtcgaataagctctagaacttccgagacatctgtattagaggcgtagtagctggttgaatgcgatgggtttggatgaaactcgaatctggtcccgtgcaagtataatgcatgtgtgatgagatcct

SEQ ID NO: 461535 - DNA, 259 bp, Sorghum bicolor
  unsure (1)..(259): unsure at all n locations
gcgtccgggaggcgaggccgacggcgactgctccgacgtcctcatcgtcagcgactccacggcgatcgccgcgcacaacgaggacgggaacgtcgcgctgctcggccacacgtaccttgtgcggnctacgctgccggacggcgcgtccttcaccgcctacacctacgccgttgagctcccgagctgggccttcgggttcaacaccaacggagtggccttgccgctcgactcggttcctccggtgaacgacgatatcgta

SEQ ID NO: 461536 - DNA, 461 bp, Sorghum bicolor
gcttgctatccacccggttgcattcaggcgggcgtggcgtagaacttgctgtcgattgccaacgacgcgccgccagagcgcgcaaccgcctaaccgccgtgggtgcaccctgatgagtagccatacacgcgagatccatattcaacgcttcgacctggagggcgcctgcagctggatgtccggcatctgcgggccgcaccgcctggcgacaagcacgcccgagcgcctgcgttttcaccacagcgccaatgtgttcaagtcccgcgccaccaccttgggcgtgatcgagtacggcaccgatgtgaccattgatatcgaagacgccgagcacttcagcagctacagcctgagcctgccgttggtgggcgagcaggaattgagcaagaacggggagcgcctgagtttccaccgtgaccaaggcgtgattttgtcgcctaacagcatcaggtgctggcgatttc

SEQ ID NO: 461537 - DNA, 103 bp, Sorghum bicolor
cgcgtccgtgattacaccgggctgatcttgctgctccatactggcagcgtccggtggtgcctactactggagcatgtcccggagtgcagacaaaatcgactat

SEQ ID NO: 461538 - DNA, 59 bp, Sorghum bicolor
cgtccgcccacgcgtccgcccacgcgtctcgaataaaataaaagataataaaagataaa

SEQ ID NO: 461539 - DNA, 494 bp, Sorghum bicolor
cgtccggaaatggtttcagggagtaccaaccgaaaggcttgaaccctcctaatggcaaccaatttggatttacggtgggccctttacaggaccagatgttgcaccaacagaaggtccatgcaccaccatactcgtcaccattcatggggttccacaatcaccccttggcagttccaacaaatgggtacttgccatatcctcagcctggtcacttctaccctggccctatggcccctgttggatatggagtcactggcaaccagtgtgttgacttcccaatgcagtacagcaataacatccatccttacactggccctgaatttggttttctgccttcacaaccagttcacaagaccccagtgagcttccatgctgtgccagtgccaccactgaccccgctgtgtagaagcggagtgccagtggtgataaatcaagagaggcagcagagccctgccctctttcctaaactaaaacaaggcagtgtcggccctgag

SEQ ID NO: 461540 - DNA, 212 bp, Sorghum bicolor
cacgcgaccggtacgcgtgggcgaggacgctagctgctacttcccgttgcggcggtccttctggtcactgtttgggcatcgccatcgcgatggggtacgcggtcacgtgggtgagctatgcgcggctgagccaacacgcacggcaggtccatggagggcgacagtcatatgccggcgtgacgaacaaatctcaacttgatcaatccgaagtc

SEQ ID NO: 461541 - DNA, 464 bp, Sorghum bicolor
cgtccggtaaccaatgtgatggatttgatatttggcatttgatatgacaatgaggaccaatgcatctgggaccttctctgtttcttctgtttacttgttcgagaatgccagcattccaaagattcagcagcaaattttgctgaagtttgagagcttatagagtgaactttctttcggtgatgtaacattaaaattatgcaatttttcatgtttattgtacttatatgttgtctcatggtatgtccatatgagggccattgtatgttaatggacatgctataggtcttgtagtggggcgatttttcatattttcaacttgttcgtgtattttttttcttcttctgtcgtttaagtgttaccttgcttctgcctctccctctgaagaggtgctggtgtaattttcgagaaatcatgtgttgctctcaggccaatacaaatgaaaggtttcaattcatctttaaaaa

SEQ ID NO: 461542 - DNA, 74 bp, Sorghum bicolor
cgtccgaaaaaaaaaaaataaaaaataaaaaaaaaaaaaaaaaaataaaaaaggggcggccgttataaaaaggg

SEQ ID NO: 461543 - DNA, 283 bp, Sorghum bicolor
cgtccgaccagagatgcaagctgaggtagagaggcgagactgtgagtggagatacaggagggccgggcggtcgccgggaacatacttatgagcgtagctcatgaagcttatgacattccaagggggctctctctatgcctgccgtgcttgactcgagaccgacgcacttgacgctaaccacaccgcctgtgaatgagactcagtcgtcgcccggagaatgcaccggacgatgattgatgccgccaacatgttctacaatgactgctgctgaagctctcagtga

SEQ ID NO: 461544 - DNA, 422 bp, Sorghum bicolor
  unsure (1)..(422): unsure at all n locations
cgtccggaagaattagttggtgatgatgatgtttcaagagctcttcttggtgcctgtaaaggtcttcctgaacctgtacttgctgtatatgatcaactgttatctaatggtgcaatcataccctcactaaatctgaagttgcgcctgctgcgatcagttcttgcaatcctccgtgagtggnggatatctgtcgttgcacataggctaggcaccacaagtgctggggcttcattctttcttgatggaacattctcaatgaaccaaacagggactgcaaatcaaggtgctcgagataaaataattagtttggcgaacaggtacatgactgaggtgaggcgattaaaccttccacagaaccaaaacggaggatgtcttaccgcggtttccgtgaaccttgaggagaaaattactatctccttata

SEQ ID NO: 461545 - DNA, 432 bp, Sorghum bicolor
cgtccgcagctcccgaagtcagccaacaaagcgcctccagccacaagagaactgaagtttggtaccgccttaacttacgaagctggacctggacgcggctgctatattcacccgctggaaggagcgtagaggatgtgaagagacggacacgaggttcccaggactgcacacacgactgagtgctcaacaagtactaccacgtccgtggccagactaaagagcacattgatgtgatgtgcagatggacagtcatctctgatactgcacatattgcctatgccgcgtcctgctgtgtgacacagacgatgatacagaacatcctgcgtgactgttgagatcaggcatatcacctctactgactcagtgtttctaaaacaaaggagcctacgaagtattgcgactgcgaccccggcaagaagcggaaggaaaagg

SEQ ID NO: 461546 - DNA, 317 bp, Sorghum bicolor
cgtccggaccagggcaggcagctacacgcaagaagctcgacttcgatgtgcaaggtgtacacaagctgtgaccaacaaaagtgcagcgctcaagattatccaccgtgcgcaccacgcattgatgtcatgactgccgctgtgtgaccaggtcagggcgtatatcgattgctggccactattgactgtcacgatgcacgtgacatgcaccataatggactgcaaatataactgcaaatgcctaatgcatgtagtgctctcagctgatagcagcaagtgtatgtgctagcgtgtctctacaccgtagaggtcacatatgt

SEQ ID NO: 461547 - DNA, 412 bp, Sorghum bicolor
acgcgtccgcggacacgtgggccaactcactctacttctacgatactactactagaactacatacagcagacatgctcccaccagatggccccatcaatacaacagtcttgctgacaaatactactcataccacacactactgatactaatacttaaaaacaagaaccatagatctataaaactaaatgatcatatataatatgatcaaagaggaaaacatgtacaaggatgatttgaataaattgaacattccaaatgttagatcatatacttacacagattcccaagataacatgtacaaactcattttctaaatactatagtagtcatagattcagatcctagtgtgcaaactattggtctagtttcatgtgatatgaacttcgcataggagtcaatatcaacagaatt

SEQ ID NO: 461548 - DNA, 509 bp, Sorghum bicolor
cgtccgcactgacaaggtcaaagaatctccagtcaaacatgttttgccctccactggtatggctgctcatgcagtggatgatctgtttgaagctgttgaactggaggatagacatgatccaataaacgcatcaatagaaaatgatgctgatgacgaaactaggtcgcctgttatgcccccacaaccaccaccagtggttaattcttacgagcagtatgaggctgatgatgaggaagtcgacgtggactaagtagaatgtcgagatggtactggaatgatctatagctctggcatgtgtaaagccctatgtatttgatgctggaatttaccttgcataaaaaagcattcattagtgatccttggtggatgcggtttaagcagtcaacttttttcttgctttcctgaaggcaacatgccctgttacctgtactgtacctaatataacctcgggtggctagtcttttggtagtgccctggttcttttgagtggtgctgtgcttgtcgtgaca

SEQ ID NO: 461549 - DNA, 136 bp, Sorghum bicolor
cgttcgatccaacaacaacaacaacaacaacccggcgggccaaattcggtttttttacacagagcacacaccccagggatatggcttctcgcgcgggcaaccaaccctgtctgtcggggcccggggggggcaaaaa

SEQ ID NO: 461550 - DNA, 370 bp, Sorghum bicolor
cgtccggcaagctcttctaatggctgctcttaaagctggaaatgcaccacaaatgattccagggaatgccaatcagctaaatgctaatggttctaatccccctcttggaaccttgcctttccaaaactggacaaatcttggttatcaaaatcctgggttgactccagcagcagcacagaatggtgccaccaaggttgcgaacaacaatcaggacttttcttctggtacctttggttttggcacacctgggtaagctatactgtctgctagttgcagaatgcggtcgttggaatttcatgctgcaccaaatgggatttgtaaacaaaatttagatgtgtattgaactcagtagttgatcatatgtccattt

SEQ ID NO: 461551 - DNA, 455 bp, Sorghum bicolor
cgtccgcccacgcgtccgggcagcagaaaccctaggaagcaaggaggacggcggccgggagcagaaaccctagagtctctcgcacggcctgcgcatcctaaagttgacaatggctgctgttgtggaggtcacgtttgatgcacaaaaacatgtcaatgtctccaaggggtctattgttggtgaggatggtggtattggataccttgtgtaccccatgcccccagctggcacttttgacctgtccactgacaaggaattactcaagaacatcaatcaagagctcatcggttgtaaaggaggtgataacgcccgtgcaggcagcccaaagacactgcgtaaggcttgcgagaaagctgttcgcagggcctttctggcctatctagggcagtaaatgcatttgaacattgtctcaaacaattcttgagtatatggtgaataacacgtattgatatgtg

SEQ ID NO: 461552 - DNA, 348 bp, Sorghum bicolor
cgtccgatctggataaggtcgagaatgtgtcgcagtgcccagaactgaagcatctacattcggactgtagtatgagcacggaagggcagcatggcacgtttcgcaggaccgccacaagagtctcgctgacgtgtcggttggtgctgaaagtccacaaaaagctatttaaaatctagaaattctgattatagccttaagcaagtatccgcaaaacaaaacccgaaaggaaagaaagcgttttctggtcaagaatcccaaagagcggtcgatcccagtttctagaaatcgacaacgagaaggaacaagaaatcgctgggtatgatgtacgcgtccgagatgatgctgttt

SEQ ID NO: 461553 - DNA, 347 bp, Sorghum bicolor
cgtccgcagcacgcatgagcatcacgagcctgaataagtctatgggcgtgatttacacgaccgccgcgggacttataatgagggctttgtccgcgatgaaggatgccaccgatcttgaagccgagatgaccgtcgtacacgacgagagtcataccatggatgccgacagccagtttttggcgtccatgtggcccgactacgacaaggtagtcaagttcatatctgtttcggcttacggtgctcccatgccggccactgatatgtactcaccacaggtagcagttgtgtccgttcccttctgcgaagagtctgctatcacccccgcagacgaaaccttcgatggaaaa

SEQ ID NO: 461554 - DNA, 150 bp, Sorghum bicolor
cgtccggcttcctgcaactatctttattgagggttatggtggccgccttaccattcaacttgccaaggagggtttcactattggttgggtggctttggtcaaatcttggttgggctattttggccaatttacccaattcttgggggccaa

SEQ ID NO: 461555 - DNA, 539 bp, Sorghum bicolor
cgtccggcttgctgcagctatctatatggaggataatgttgtcggcattacaattcagcttgcacagaaggattacactattggctgtgtgcgagaggacaattcttgcctggcatatagtgtcaattagaccaattcatcggtgacgtagcatactagctgcactgactctacaggatctgcgaattgcaaagggcgctgagacagtagttgagtcgatcatgatattcaggaatcctgcgtccataacaggaatgctcgtgtacactctcacggttataggcgttattctttacagagaatacaagacgcgcatcaacaagccatgaacaccctagaagacagtaaatatggcaatcattgctttgtactgtcagtgcctacagctaatatttgatgagaaatactacggagtcgatcacatacaaatcctaagccatactgactcagcaagtggacatcgcggatagaagtccaatactacctgtagtatatactagacatgacgcaggcatttagttcaatggcgatgatggata

SEQ ID NO: 461556 - DNA, 285 bp, Sorghum bicolor
aaaaaaaaataataataaaaaaaaaaaaagtgggtggccttgacgggccggcccgccagcagaaaccctttttggcttgtttgggttggcccaattttgggagggctcggggggtcattcccacggtttattacataaaaaccctcctaaaacacttccaccggtggttatggccctagctgaggcattcaaattggttgataacgcctttttgcctttcaggatttgtgcacttttagctcacttgtaccctgccgaaaacatggatttagttgtactccttta

SEQ ID NO: 461557 - DNA, 501 bp, Sorghum bicolor
cgtccgaagagataacagcaaaggatggcactaccagtaaagaaacaaaggaagcatactcggagaaacctcaagaggctactaagtgctcacagatctcacggaagagcctagatagccgagttgggaaatccaaaacagtggatgttcctgataaaccacggatgagctcagatgacattgacaagttccggaggagaagatgcttggtttggtgatgcctatgttctgcacaaattgtgaaacagtacctgagtgaggatactatagcatggaaatcaagcaactgtattactacatcatgtcaccaggaatggcatcagcggttcctgcagtgcagagggaaccacctgttaaataggaaaaaagaaccaggaggctaccatcatcatcatccatcaaaggcacggttacttgactgaaaactggagttcctcaattaatttaacacttacaccgtcaacatgttgtgcagcatcggttagggtttccatcatgtaa

SEQ ID NO: 461558 - DNA, 325 bp, Sorghum bicolor
  unsure (1)..(325): unsure at all n locations
cgtccgccgccgtgccgatccacatccacgccatgggtctctcgtcgatctgttgttttccgcttgtttttcacgaatgtgtttgtttgtagtatgtgtttggtactggtactagtaggccgcagctagctgcaaacctgcttgtagcatagacaagagttttttttttttttttgttaatagatggcttggtagctagtagctagtagcatagagcatagggactgtgtagacgagctctagacatctggcgctgtgttgtgttttgtactattcaaatcaggaaatccatgtgaattgcacgagctgtggtnnaaaaaataaa

SEQ ID NO: 461559 - DNA, 322 bp, Sorghum bicolor
  unsure (1)..(322): unsure at all n locations
gcgtccgagacaacacataaaatacaataaccaaggtaggcgtaagagtacagcgccgagaggttcttagagccacataacttgataacgggcggggcgcgtttaaagtgctaggctggccgcttggnctcttcctcacgtcggcctgtacgagagcagcgtggaggtgcttcacgtgccgtacattgtcccagtggatgtgcggcgggctgtccgtcgttaggtgggtggaactcctcgacggccccggtttattcctctacgcgtatatgcacggaagctcccttgccataatggcgagcgctagctactacgtcgcctt

SEQ ID NO: 461560 - DNA, 210 bp, Sorghum bicolor
cgtccgagccggcggagccatggcgaccactctttcgttatcctctcccctcttcctcggagctccggccagagctagagatgcaatttcgtatggagtggcttcggctagtatatcaccaaccactgtaaatgttctaagcaagggctacacgagcagggttcctgttcgggagcaacaacgacgaatggcgatagtatctgtgcttgg

SEQ ID NO: 461561 - DNA, 136 bp, Sorghum bicolor
cgtccgaaaaaaaaaaaacataaggaaaaaaaaataaatactataatgcaaaaaaaaaaaaataacagtaaaaaaaaaatgatacaaaaaaaaaggaaaagctaaaataaattaaacagctaattaaaatgggggg

SEQ ID NO: 461562 - DNA, 439 bp, Sorghum bicolor
  unsure (1)..(439): unsure at all n locations
cgtccgagcatccaagcattggcagtacagaagaacaatccacattaccacctacatccattgcataactaatgataccaaaataatgtgcaatcctgctttgaagtggaagttctcctagcacagaggtcgagttgacgctgaaggggttttcctgcatgtgccttgctatgacttatgactgtgaaaacatatcatcggaatcagcttcagacttcagagcattgtcttcagagaaaatacatcagctntaggttttattttttgccaacagcaacaattctggatctcctcgctagcnaatatctgggagaagtagcattcaagttgaggttcaacttctgtcaagttggccttcttcatttntgaagaactcctaaccaaagttattgtagctaccatcttgagcatcttccaaaaaaaaaaaagtnggcaagtt

SEQ ID NO: 461563 - DNA, 208 bp, Sorghum bicolor
cgtacggaagaaggaggagtgtcaagcggaggtacgccgactccgccgcaagctgtaagcaacattcctagctggatctttgtgtgcaggtatccagtgccgagctcatccgcatcacgctcactctcaacttctgctggtgggccaccgccgccatgctcttcggctacgtctgctggagagagtgccccgactcttaggacgggtt

SEQ ID NO: 461564 - DNA, 416 bp, Sorghum bicolor
cgtccgcccacgcgtccgtccacgcgtccgtccacgcgtccgcccacgcgtccgaaaaaaaaaaaaaaaaaaaaaaaaaaaaaaaaaaaaaaaagaaaaaaattaaaaaaaaaaaaatggggaaaaaaaaataaaaaatattaatataaaaaaaaaaaaaaaaaaaaaaaaaaaaaaaataaaaaaaaaaaaaaaaataaaaaaagggggggcccgtttttttttttttttttttggctttttattaagaggatttttttttaaatggggtttaacacaaaatttttttttttaaaaaaaattttttaaaaaatgggggtgagatattttaaaatgttttttttgggttaaaatgagtaaacatttattgtgttttttctacattttagaaattaaatatattttggaattttttt

SEQ ID NO: 461565 - DNA, 442 bp, Sorghum bicolor
  unsure (1)..(442): unsure at all n locations
cgtccgggattggagacgcagaatggaagtaatttgttgaatcaagagaataaacctgtaaatgggatggaatttcctccaagcaatgttaatggcctcggtttccattttgatgtatctgaactcagcggaacaaagcaactataccagaggatagagaattccatggaaagggcttttcttctcccttcggcttcgtcaaagcttaaaagtgcaaatggagatttcggaataatagatctacatgtgaggcagtcgatggtcaatgacacggcaaagcatgatggcaccgcagctgaatcagcagaaactcgtcctccaaggacacaagagctagaagcagatcctnccaggtctgaagaaaagctggaacaagggaagattgccctcgggggacactcgaagaagacacaccctcatctgaagaaaaggctaagatgag

SEQ ID NO: 461566 - DNA, 372 bp, Sorghum bicolor
  unsure (1)..(372): unsure at all n locations
cgtccgaagagaataaaatttataaaaaaacacncttttacaatataagtaaacctgaaagactacaataataaaagataaaaacataaatataaacgggtggttagataaccatgcgatgttgagttctttcacatatttttaaataattttttatataacaaacaatagctttaagctggaaactctaaaaacggggggggcctttttggaggtgcccttttttcttccccgttgcgggcctagaaaggatcttatttgtggggcacaatattgtatttagggtgcagggttataaacccttaggggggagcaaactccaggtcacagcccacttattttgagattcgagnnanncccttttgcccgggg

SEQ ID NO: 461567 - DNA, 293 bp, Sorghum bicolor
cgtccgcgccatgcgtcaaggtcttggacgaggagttcggaatcgtgaaagggaccaagcctgctacgcactcggacacggctgacacacagggtgaaggacgcgtcccaccatgacgctgggagggaactcaccggaacacagcaactataccagaggagcgcgggcgccatggaaagggcggctcttgtgccttcggctctgaaaagcttaaaagcgcaaatggagatctcggaataatagatctacatgtgaggcaggcgatggtcaatgacacggcaaagcatgatggc

SEQ ID NO: 461568 - DNA, 409 bp, Sorghum bicolor
  unsure (1)..(409): unsure at all n locations
tcgacccacgcgtacgcccatgaggcaaaaagttccttacttccagaaacataatagcttgaagcatttgtattgttttttgactactgcataagcataaataacatccaaaagttgaggcatttgcatttcatttgtccttaatggatgcaaccttctcctatcagcattgctctttcttttgatggaatctcccttgaaaaagaagagcagccaagtaaatcgtgggaacgttttgtcttgtgtctgatgacaactgcaggtcgtcaaggcaatcgagaatgccattcccgtgcggcaagcgctgcccgtcgccgctgccgagagcagcgacccggcatgggagaggagctgaaggccatcatccgncatgacgctctccctctccacctnncttctccccaccccc

SEQ ID NO: 461569 - DNA, 97 bp, Sorghum bicolor
acaaagcaaatgccctaaacattcttttacccatatccccctagaaccaaccgctacaagtcacaggagtaagcctaacagcacggggatttacatg

SEQ ID NO: 461570 - DNA, 431 bp, Sorghum bicolor
cgtccggttgggttaactcgccgggaaacgctacggcacagctcctgggagtggacccattgcaggccgggaacgtggtgcagctgctggtggtgctcgggatgacggtggggtggatctccacctacatgttccgggtggccaacaaggacatgacctacgcgcaccagctcagggactactagaagcaagtcatggagaaacggctggagagcttgacggaggctgagctgcaagctctgctcgagcaggtggaggaggagaagcagcgcatgccgtccgtcccggaagagcctaacgctattaccttcaagaagaaatgagggacaccgtcttccttcgacatgtttatagcgtagctttattagctagctccatcgatctcttttaagatctgtacaatacgctagggcactagtgctgtcaaacat

SEQ ID NO: 461571 - DNA, 455 bp, Sorghum bicolor
cgtccggaggtgatgctgaggaaaatggtgaggaagatgaggaagatcccgaagaccaggagggtggtggcggcgatgacgatgacgacgatgacgatgacaatggggatgatgaggacgacgacaatggggatgacgaggaggaggatggtgtagatgaggaggaagacgacgaccaggatgaggacgaggaggaagatgatgatgaagactcactccagcccccaaagaagaggaagaagtgaagatcttcgctccggctttagttaccatgtgctgagttctggctcgcttttcgtcatatcctcgcatttgaactttcccttagagagttaagaagggcttgtaagagctttatgatttgatgaggcaattagggagaactctatgtcattgttgcttgcttctgtggagttgaacagatgtttcgctaacataattcaacctgagtgatg

SEQ ID NO: 461572 - DNA, 324 bp, Sorghum bicolor
gtcgacccacgcgtccgctggaagggacctgcaaagaagtgagaggaagtgctaataggcctcagactagaaggaagtcaggctggcatacatggccagcagatagcttcacttgccaagggaaacgtacctactccctgaggtttgctgcctcggaaatatgtgttgatgataggaagcatcttctaggatcctgacctggtggctggcgagatgttgagtcagacaccggccaaaccaccagtttcgcctctactacttcatttgtaatataatccttgacgttctaaaaatgccatgcccctggtttaattttatccatgc

SEQ ID NO: 461573 - DNA, 122 bp, Sorghum bicolor
gcaagctgcactgccggcgacgctcggcggggtggatccgcaccccagctcagctcaggtcgctgcgcgccgcaggtgtcgggccgagcctgctgcgccggcagcggagggcccgggaggag

SEQ ID NO: 461574 - DNA, 135 bp, Sorghum bicolor
cgtccgagagtggatggctgaccatatcacgactaaagagcacggggctgcacttaaaatgttcatcaataaaggttctatactatacgaggcggagggtgcattgattaatacaggtggttcgaaacgctaaat

SEQ ID NO: 461575 - DNA, 429 bp, Sorghum bicolor
cgtccgggagaagatgctgaatgtgctgcagattgtgcagaagaggaacagtgatccagcattgacgggggaggaggtggagcttgattttgatgagctggatatcgagaccctgtgggagcttgatcgatttgtggtcaattggaggaaggcgctaaagaagagccagcggaattctatgatgaatggtgatgctgctgccatgaatggagacgccattgatgtgacaattgttccggatgatgatgacatggtcgaggttgctgtcaatccgtctgtggtggttgaaattggagagtcggagactgacattccaaagaagagggaaatggaagcggaggacgagtatgtcgatataggtgacgagatgccaacggtgaattaccagtcggtggagattgagccggattccccggcagctagcagctt

SEQ ID NO: 461576 - DNA, 311 bp, Sorghum bicolor
cgtccggcctacggtgcaggatgtcatatgcccaaactgtaatgatggttctatccaacaaagtagtgctatgggtggccgattgaacacttacgggctaattgaaccggactttgaagagcgtctagctagaagatttgcaatgatggatgccatgtcttcccttatgcggcaacggatggaagaaatggtagaagatagggtgattgatattcatggtggacacggggcaggtactgtatatagaaggaggccaactgctgatcctacactggaatctggcggcatcccttctgctggagttggtagca

SEQ ID NO: 461577 - DNA, 344 bp, Sorghum bicolor
cgtccgcaaggaggctggaggcctaaggcctacgggtagtaccgtgacggtgctactggcgataacgtgacaggcagcagactgactgccactcaggggatgcagcagataatcgagtgtctactggacagatcgcgcccggcaggcctgatgcgtgcccaccgtgcacgtaacgtctgacatgtactaccatgctgctcctgcgcacgtccatgtgttatcattcactggtgtactagatcgctttgttttttttgcaacatgaaaatgttatggaggatatggggaacctaaatggatgctagcaaggctagtgaagctgaagaaggaggaaagcataaacg

SEQ ID NO: 461578 - DNA, 491 bp, Sorghum bicolor
cgtccggaacaggaaacgatttcgaggaaaacctcacctgcgtggccgcggcgacaaatttccagcgatgtcagcggcgccggctgctagcccatggttacggccgtctccaactgtgcggctccgcgaaacggcctccttggcttgtagcatcagctccacccctacgcggctctgcatcggacgacgctgctcggatagaacttttgtagggattcaaaccgcaggttccgacttgagaagatccacgattgcccatgttaaaagtggggaggctgatggatatccaaaaactgaggatctggtggatgaagatactctgctatcaaatttagacagagcaatcaaggaagaagattatgcccgtgcagcgaagatccgggatgatctgcgtatcctccatgaggatgctaaagcttcgctcctagcaagcaaatgcacggttctacaatgccttcaagaatggagatatcgctgcaatgtattctatc

SEQ ID NO: 461579 - DNA, 60 bp, Sorghum bicolor
gtcgacccacgcgtcctgaacaggaaacgatttcaaggaaaacctcacctgcgtggtcgg

SEQ ID NO: 461580 - DNA, 338 bp, Sorghum bicolor
cgtccgcctgaagtctctgacagtgcaagcttactaaaggcagaatggctagaagctttcgaggctggatcaagctgcatccacgctggcgcacacagtgtagctgacaaggtctatgtgactctgcaaccaatcacacaacttccagatggaggcgtcacaaatcttccagatggaggtgtcataaatgttccagatggtggtgacgattgttttgatataggtgagatgctcagtatgatggaagctcatccacataatgaacgtggagctcacgttcgcattgggcagccctggagactagatgggctcgattcgagtgtcctggagagcatgct

SEQ ID NO: 461581 - DNA, 99 bp, Sorghum bicolor
cgcgtccggacgctgacactgatatgtacttctatgttattgttaattatatccctcaatggagctctaaaaaaaaaaaaaaaaaaatagggggagcgc

SEQ ID NO: 461582 - DNA, 76 bp, Sorghum bicolor
cgtccggtcgctgacactgatatgtactaactatgttatagataattatatcccttaatggagctttatctcgccg

SEQ ID NO: 461583 - DNA, 350 bp, Sorghum bicolor
gcgtccggttgcattgcaaaaaaaaaaaacttacacaaacaaaaaaagcaagcacaaattgctgaatacaaaaataaaaaacaacagcataagaggagccggcggaaaaaaacaaggggctgtggttcataaaccaacgtgcaaacgggctcggcctttttatgaaacccacgtttgattactcattcttgacactcttatactttttttaatgtgaccccaaagtccatttcaatgcccccggtatgaaacccttgggccttgaaaactcctgctttatccacattaaatcccttaacaaaaaatcctcctttccaatctatctttaaaatcaaagagctcccaactaa

SEQ ID NO: 461584 - DNA, 284 bp, Sorghum bicolor
cgtccggacacaatagaaccggcggatcgaccggttctaaacagtaggaccaatggaccattgaaccgacggactggccggatcgattttcggagcgggactaataactgtgcacatggtcctagtcgcatggagggatagtgagtaacgagtacgatgcggtacgcactagtacacaagggccgatcggacgagccaaacagcatatacagctccgcgggggaggctcatgcatatacaaagtcgaacgcctacaagaagatgtgcgaatacacgtgacatac

SEQ ID NO: 461585 - DNA, 99 bp, Sorghum bicolor
acccagcataatggggagtagccaccttcgccgtggagaactgtgaaccgagatactcgtagcagcattaaggtcagcgcatcgatgtgagagcctatc

SEQ ID NO: 461586 - DNA, 426 bp, Sorghum bicolor
tcgacccacgcgtccggaaaagttatcctcagggaaaactaaacctagaaattttcaatatgaaactgctcaatccatttacatttacacattagggtggttgttgtctgagccttttctgcatatacagcacctttacaaaatttatttcatgccaacagcaagaaagtttgcacgtacaaaaagaaagagaaccatttcctttccaaatgaacatataccaccttgtttagttaaatttattttattcagtaggctctgcccctcctattccctcaaaaaaaaaatgcatgattgttggaaacttaaaagggttaaaggatattgctcctgtgttaagttttcacaatcatgagttgcaaattacattgttttggaaccagtaaaacattactggacataaactggatgctctctaggagatgc

SEQ ID NO: 461587 - DNA, 470 bp, Sorghum bicolor
  unsure (1)..(470): unsure at all n locations
cgtccgcggacgcgtgggatttcctgggcatcaaacgaagtgccaagcctggaagcttacctcctccagtcccaaagaaaccgaagaactgaacctgctctgccattcactctgagtaggaatcagccgacctgcttcagcaggctacaacgcattcactgtgaagcaatcagcccacttaacacattcgctgtgagttgcaatcagcccacctgcttccgcaggctacaacaggtccagatgcctacacggcatgctgaagccccagtgcactgaaaatgcaatagcctgtacatttcttctaagctggtcacactaacgttctgacatgttcgatgcgattttgtaagtgatactagtgcatccttgttctggcaaacacagatgttgaacatttaagtgatggaactaaatattggtctcgcaacacaccaatnttggtttggaataaacctgtaagttatgatgtc

SEQ ID NO: 461588 - DNA, 305 bp, Sorghum bicolor
ggcttccggtggttggatttggtggcggacttcggttaggttcacatatcgcttgcagttcggttcgcttcaatggaaagctgatgtctctaggttagaagaataactatgagtaagaaaggaaggatggctgctagattgggtagctagctgttggctgcttggttctacagtagcttggagcttggcttctaggtgttctagtgatgggtggtggtggtgttggttcaggggatggattaaattagtgtctgaaatagcctgttggtttaggtgatcttaagtagacgacctgattataattc

SEQ ID NO: 461589 - DNA, 286 bp, Sorghum bicolor
cgtccgcggacgcgtgggtgcttggtcaatttctgctgttgaattcatagctgaacctgcatgtatgtgtagtagacacttccgttcaatttagtgatacttgttatccatccaccttcggatactctgtcggtcccaaaatgagttcaattctagatttgaatcatgttataaactttcttaaatttggccaagttatagaagatagtatcaatgtttatgtctctgagtaggcttactatgccatgattaacctgatgacctttaaattgtttttttactcttc

SEQ ID NO: 461590 - DNA, 363 bp, Sorghum bicolor
cgtccgtcttgattctctatgatcagtagcactcacttgtaccagcagttaggaatgacgtgtgcataaccattactgagcaaaaaatataagagaacattttgacacaaattatccttatgaagtgtacatctatgccccaattgaaaagcttgtcttgtctttaatcttgtatatgtaaatgttctcttatcactgatttaatagtcgcaagtatgaagataagtaaactctatgctgccccctttttttgtagatcatcatgcacatgatcacactcatgatcctggtgtttcttctgtgagcattgtttgcgaaagggagatggatcttgaaaaggctgacttttggttgggaacctac

SEQ ID NO: 461591 - DNA, 331 bp, Sorghum bicolor
  unsure (1)..(331): unsure at all n locations
cgtccggacgaagccataccaaacgggttagtcacgctaactaacggcatcacgctgaatgatctctatgctcgtcttgtgagacatgaggagggtcagcgcatcaacatccacaaaactgatctatggtggagatgcgacacaacaagtgatgagacacaggatctgctatctcctcttccatcatcaacgtcggtggagccagtatgcatatccggnggctcgaatacgggctcacgattccaacttgcaggaaaaccgacgaacgctgctcgctcggcttggggcgggacgggttcacttttgcccccacgggtctcgggtttggggc

SEQ ID NO: 461592 - DNA, 155 bp, Sorghum bicolor
cgtccgacctgcgagcatggcatcctagagccgaggggtgcctacagctctaccacgagctgctatacggcgacccgctcactgttgactaggtccatgctctggagccatttgtcaacgttctttgggcagccaccggcaggtcagtcactaaa

SEQ ID NO: 461593 - DNA, 462 bp, Sorghum bicolor
cgtccggccccggcgcgctcgatggggtcctgccctcgctctcgcgcgtctccttcaacccgcagctcatcgtcgagtatggcgacttggtgcgcttcttcctgtccccgttctaccacttgagtgaaagccacctcttctacaacatgacatctctcctgtggaagggcattcagctcgagacatccatgggtagcaccgagtttgcttccatgtctgccgtgctgcttggcctgtcgcagggtatcacgctgctcctctccagaggcttgctcttgctcggtgacgataccgcgtactatgatcagcatgctgttggattctctggtattctgtttgccatgaaggttgtgctgaacgcctggtcagacgatttcgtgtatctgcatgggatgattcttccctcgaaatatgctgccttggcagagttgatcctcatccaaggtttcattcctgggacat

SEQ ID NO: 461594 - DNA, 320 bp, Sorghum bicolor
aagagagccttacatcaataacactaacaaataaattctcatatcactgaaactatagactcgcgcgtgcgtgttatctattggcaatatgtcgcgcatcatgccaaagataagcattttgcaccacttgtagagcaaatagccaagtttgactactcactatacattattgaaatccaacagcactggatagaggctccaactaaccgtcatgcaatatagaacgtaaacatgagcaggagggcagttcacaatgcacatcttcgaatcagcggcactgatcgcacacagcattattcaagtctatcttctgcgccggc

SEQ ID NO: 461595 - DNA, 72 bp, Sorghum bicolor
cccggtcgaccacgcgtccgaaagaaaaaaaaaaaaaaaaaaaaaaaaaaaaaaaaaaaaaaagggcaagcg

SEQ ID NO: 461596 - DNA, 405 bp, Sorghum bicolor
  unsure (1)..(405): unsure at all n locations
cgtccgagatttcttctcgccagtagcaaaaggtgttgagcagagagcacctggagtgatgacaggggaacaatacgagctcatatccggtcaaatgtgatttttgttggttcaaggtcaatgctagtttttcatgttgcttcaaccacacagaagggatggtggtttttggtatcctgaataattctacagttagaaggcaggagatatctcagtctcctagacgacattggaccatagagattttcctttggtttcgctcttatttttgttcagcggtggaattcccaagtactttgaggtagccctgtgtgtaatctgtcctcaaatttgcaacatgtatatttgtttcataataactcaaatctgcattagcttctttgggttcaaannaaaaaaaaanaa

SEQ ID NO: 461597 - DNA, 327 bp, Sorghum bicolor
  unsure (1)..(327): unsure at all n locations
aaaaaaaaaaaaaaggacaaaaactaaaaaaaataaaacgggcggtcggtaaaaaaaataaaaataatattaaacacaccggaggaggggagtatgatcacgaggacagccattgtttcattacgtggccaccctggtgggcgggcttcctgggcacctaacctgtccgtcccggcccccgttaacgggcggcatggtgtccggttccccttcttctagccggaaatggctgttggccccaacaatgttgtcaanatttctgttcccggccgcttaggtaccccggcgccgtggtgcccgacttcttttagggcacgctggttgggg

SEQ ID NO: 461598 - DNA, 296 bp, Sorghum bicolor
  unsure (1)..(296): unsure at all n locations
cgtccggtggaangcggcagtgtctgtgcatccaagcggagtaccacgtacgcaacgagcaccggcgagcagaacagcatggccactatgagaccaagcattaggcgccaagagcacagacacagggtgccgcacggttactactggaactgaaactcatgcgaacgatcgatgcatatgcacatgcggatatgcagatcgacatcgacgaagctagcataattgtcctatggactgctacgacgactacatactgctgagtaatagacaacctgcgggagtgctactactaacta

SEQ ID NO: 461599 - DNA, 395 bp, Sorghum bicolor
cgtccgcgttactgccgccgcctgcgccgcgtcgacttcagcaacgtcggggtgcccaacctcaggagcttcaccgtcgtcgactgctcccgcaccaccgagctgcgggtcccggtcgcgctccgcctccggtccttccgcttcagcggcgccttcctctccagcaacatcctctctggcgccaagggctctcttgagcatctctacctctgctctggcgggccagagaccggccttcccacaaccaacttgctgtacgcagttcctcgcctatcgaacctcactgtcctcaccctctgcagcattgccctccagtatgtttcttccacagccaaggctgtaacggagagcaacctgcatagtctgagggagctccatttgctcatgttcgggat

SEQ ID NO: 461600 - DNA, 307 bp, Sorghum bicolor
  unsure (1)..(307): unsure at all n locations
tccgtccggattcccggtcgaccacgcgtccgattaacggctgttaaaaccaacaccacgaactgaaccaaaaaaaaaatctgccacgagttccttttgctgatccacgtcagatgcgagtctgattggtgattggaaaaaaaggacaccgctgcctgcctcacatgtcgaatagcagctggaaaacgatgggcacgtgcttgaggaaccgcatctctgcaagtctccatcatccatgcatgaattagtaaaataaattataataacacgcaacannatgtttcccacatgtggcgactgatgattc

SEQ ID NO: 461601 - DNA, 423 bp, Sorghum bicolor
  unsure (1)..(423): unsure at all n locations
cgtccggctttggaagtgtcttaggactcctgtttgcccctcccatcattcagaaccttggctgggagtctgtcttttacatatttggccttcttgggattgtttggtaagcagatatttctatgtaggtaccaaataatctattgtgagtgaactttattttctgttttgtctgcaggtgcttaggatttgaatctcttaaagtgcaacggttcggtgacaaagaaggcatattaaaccttggacaaagttctactggatctgatggtcttatctcatccgccatgtcttcggaatcatcacactcgtcattggaagatctgcaaaattcactaanaggatgtgccttggggagcatttttcaaaaagcaaaggcagtgtgggcaatgatatatgcacaacttttgggtgaagttgggggca

SEQ ID NO: 461602 - DNA, 307 bp, Sorghum bicolor
  unsure (1)..(307): unsure at all n locations
aaaaaaattataaatctnaaaaaaaaaaaaaaaaaaaaaaaaaaaattatataaatttttttttataataaatttttatttaaaaaaaagaagaataattttataaaaagaaaaagtttcaaatttttatccatttttattttttaaaaaaaatttaatttttttcaaatataatttttttttttgaaaaaattttattttgcttatttcctccttcctagaaaacaacaactatttctcaatttttcatatctttttttcttgattttttttaaaatttttaaccagggtaaaatttattttttat

SEQ ID NO: 461603 - DNA, 429 bp, Sorghum bicolor
cgtccggtcctatccagttacttccttgaaccagtaactctttgaagtttgtgcagatgcgacaaacagaagctgagatagaatttccaaccattggtgccgtctccaaagcccatccctgttccactggccatttgatttgccttggatttgaaggttttttaatcctatcctgaaccaaaatagacagaaatcatggatgagctttttggtaaatataggttttgcacttaccaatttgaagttcaatctgatcgtgatcataaaatgtgcctatctttcgaattctgctaccttcacttttgctaaccagggagtttctggatagagtgcattaatgtcaaacttgattacttcgactgacctgctgttcagatgctttgcactagttagtaacctgcccagagttgtgctaactactattctgac

SEQ ID NO: 461604 - DNA, 130 bp, Sorghum bicolor
cgcgtccgcatttttaattgtggagtagtattactatttgctgatccccaatcgaggataacatatgtataggcacgaggcatgactacgttatgcctttcgtaaatagaagaagtcaagtgttattgtt

SEQ ID NO: 461605 - DNA, 370 bp, Sorghum bicolor
ggggcggcggagtacccgaccaacaaaggaggggcctcctcctactgtcagcagcagcatcataacaccaccagcagccgccgtggtgacgacctctatttctaaaaatgattctcccccctcttctgatgatgactactacacaagatgttcttcagacgacgacgacggcgttattaattcaccaccctgggagaagctggtagccttgctccattaacttgacgtccatgaggggaggtcattgtttttacttgttggttgccaccgggtgatgaataccatcatgtgcttgttttttggctcctcttcatcaattaactcaatatattatatactacgcgtcgctaatcaaaaaaaaaaataaagg

SEQ ID NO: 461606 - DNA, 409 bp, Sorghum bicolor
  unsure (1)..(409): unsure at all n locations
cgtccgggtctctctccatcatctccatctcttgctatcaaatacaacacgattacagctcttgcttctccttttttgtcatgctgttataagttaacgtacgtacgcgtgtctgctctctgctggagactatagagtggtgtgcagagcttgctgaaacctctggtggaggaggctatagccgccctgtgcagaccggccgtgccatgccgcgtcggggtggcagacctcggctgctcctcgggccctaacgcgcttgctctcgtgtccgccgccgtcgactccctgcgccaccatcaccgncgncgtcgtcttgggtgcagtcgtcatcgtcaccagagcccaaccgccgccgacgggcgggatcagctgtacctcaacgacctcccggacaacgacttcaacctcg

SEQ ID NO: 461607 - DNA, 525 bp, Sorghum bicolor
  unsure (1)..(525): unsure at all n locations
cgtccgcggacgcgtgggtttctcgtctcagcatgacaaggcatgcattgttccactggtgaaggaaaggaacattnggacaaacaatcatggtcctactacaaatcatgattggtgttattctaaggctgcaaatgcagcaaaccaaccatgtcatttacatgtgtggctgcatgtatgacaggaaaagaagcagatggtgaaggtttcgattgtccaatgcatgattctttgattccatatcatcaactcctcaccgacgcataaccatgctaagatttatcagagttatgatcaatttgtcataggttgtgatggctggttgctgccaaaatggaggtggctctgctcatttcacctctctatatcccatgaatgcaattgtaaaaagtgtagagctgataggaaaaggcaaacaacaaatatttaaaaagatgagtgaaatgatttgntgaagtgctgaaatctcattgaaatgaactgtgccgaggatctggagccgttgtcgatataatacataatatg

SEQ ID NO: 461608 - DNA, 277 bp, Sorghum bicolor
ccgatccggtcaccaacctccgaggacaaccatcccctactttagcgggagtggctattgacttttgcccagagcggacgaaccacaacacccagtcgctggctaatcaggcatactactacatcgccatgaagttcaaggactcgtcacttgcgcagactaaccggaagcttttcgtgtggcaggctcgtgcccgtgagcgccaaactggggccgaagctttcaggtccgtagggggggtcctcaggtgggggggggggaaggccgggacctcctc

SEQ ID NO: 461609 - DNA, 273 bp, Sorghum bicolor
gcgcgtggcgcacccacaccatctctcctccccctccccacctacacctctcacccgcgaaggatcggctgcggcggcgagcgccttccctgcgcgaagtccacccggcggcagagcagagcctccttactgacgatgaggacatcgctatcatggaagatatgccgatgaggccgccgcatccggtcccaacgatgcagcaccgcagcccctcatctatagcgcgcctacctccctaaccaatctaccggatgaagacctgttctctgctgc

SEQ ID NO: 461610 - DNA, 114 bp, Sorghum bicolor
accgaccgacagacagacatggccgcctccaccgtctccggcctggccggcgcctcctccttggccagccgcccggctttttccaccagcttcacgaggggcagccgggtgtcg

SEQ ID NO: 461611 - DNA, 162 bp, Sorghum bicolor
atagactctgggatttcgtggttgaaactctgaaccattgttcctactgcttaaaagaaactgggtggaccaaatctgtgtggattttgatcccatgctgctttgctcgactaggaatattggctttgatgggttatttctgtgggccacacaatttctttt

SEQ ID NO: 461612 - DNA, 169 bp, Sorghum bicolor
  unsure (1)..(169): unsure at all n locations
aaaaatggcgcaaaaatctccccccccccgggtgtgcncccaacttacaccacatccttaatttattcaaaacccttcttatttctaagttattttcaaataattttatccaactatcactccatctaaaaaattaaatttaaattccccccaacaaaaaattttaaaa

SEQ ID NO: 461613 - DNA, 377 bp, Sorghum bicolor
ttcccaattccccatccacccggcgtgcgagctcaacaccattctcctaatgtacttacacacacacgaccactcacgaccttgtcccatcacacacgcatctccccacccgggcctgccatctacctggccggcacctcgtacacctactattctctcactgtcagactgaagagcatcatgctgctacttctctcgctccgaagcatcgaccactccgctgtcggcaaatccgtcgatccacatgatgataacgatcatctaaacaaacgatttgagctgctaccaaaatagccatcttgataataaatattcataaccaataagacattcactatccttgaacacaaatctagtccatccatcactaacttcta

SEQ ID NO: 461614 - DNA, 343 bp, Sorghum bicolor
cgtccgagctcccatacctaaactgatgtcaatgccgatgcattcaatggctaccttccggccgtcaattctaggccggtcatatcagcaggagcacgatgtggtctgggatcaagcaaaagctaacacgcataaaacaggcaccatcaaggacctagatgggacaacagtttacgacacagtcaacagagaacacagtgcgtatccaacgagacagacgtcgcatgatgtggattaccctgtagcgtgtctgttattcataagggtgacgggcctggttagcgtgatactgaatgacaacaatgtctaggcacaaatgtcttgctgtccacaggtctgtgat

SEQ ID NO: 461615 - DNA, 76 bp, Sorghum bicolor
tccggtcgacccacgcgtccgagatcccagagccggagcctacggccagtccgatccatctccccacaacccattc

SEQ ID NO: 461616 - DNA, 124 bp, Sorghum bicolor
cgtccgcatgaataataagctgctgcgtgtgaagcggtgcaaataaaagtgtaaccgtgtgcacgtacgtactctctatctatctatatatatgatgaataaaaagagagaaaattctgatgcc

SEQ ID NO: 461617 - DNA, 344 bp, Sorghum bicolor
  unsure (1)..(344): unsure at all n locations
cgtccgtactgatgctntcattcctgacgcggaaagctgaatctctgcttctccctgcatttcacgcactccaactcttcactgtacaccgatctgcaggactctgcttcatcatacgggtacacatcatcgntcaaaaaacatatataatgagcacctaacttagattgtggcaaattttggcaaagatcagacccttgactttccgtggtcttttgaaaccactgaaagcaggagatgctgcatcatggatcagactagagactttttctgcatcggtcaaccagcttagtggcagaacgaaaaatgcttttgaagactctacttcatcatcatgttacaca

SEQ ID NO: 461618 - DNA, 165 bp, Sorghum bicolor
  unsure (1)..(165): unsure at all n locations
gtcgacccacgcgtgcgaccgcttnctcctctcctccggctccaccccgtccncgcagcgtcacagggctaaaaacctgcatcgccgccgtgcgcgctcagcgccgcgcagcccgcgcagatggaacgcatgggggaggttaaggtcgtgaagctgcgggcggtg

SEQ ID NO: 461619 - DNA, 570 bp, Sorghum bicolor
  unsure (1)..(570): unsure at all n locations
atccagcaagaagatacaatccttatttccttgacaagggattggtctctgtctgccattngtcccaatctagctcataatggtactgtgcatgtgtgctattgattgtgaagaaaagttgattgcatgcattcttgggtttcacctgttcatttttattttattttattttattttgattcatgaacacttaaaatagaggctgggctcctaccctactaaactagtgtatgttgctactgcattgaatttgctcgtatcatgtgctaccccctctttgcttttaggttcaatgaacaaagagattgggtcttgcaaaatggagcataggctaaatgatgtagatattctntaggaatatgcagcccttcaccttttaaactctatattggcaaatacaaggggagcattttcccacccttaaacatgaaacaaaaagaacaaatgagagatgtcttgttctcaattttgatttatataattgagcctgatgattggtcccatttcaaaattctacttcctgtgtctatcaaaagattttattttctttaataagttggcagtacacat

SEQ ID NO: 461620 - DNA, 144 bp, Sorghum bicolor
  unsure (1)..(144): unsure at all n locations
cgtgcggccatggaagcgtnctgcgtacccataccgccctctcctccaggcagctcgtcggtggagccaggcgcacgctggcagcggccacacgcgccgcaccaagctggcgcccgtcagcgcgccccacggcgactggtgccg

SEQ ID NO: 461621 - DNA, 80 bp, Sorghum bicolor
cgtgcggatggctccttatcacatatctggtcttgtggagtaattctgtatgtgatgcttttagggaccttacctctaat

SEQ ID NO: 461622 - DNA, 207 bp, Sorghum bicolor
atgctactaccatgggcaataatccaagaagaactcgaaggaggctatattggctctggaggcatgtaaaggcaacaagtatacttccatcgatcgacaagctataccactaggacaggagcaggttctggacgaacatgcaacagaaattgccgatgagacggctcctaaaaggttatagcttgcacgaggcaagctccaaaagct

SEQ ID NO: 461623 - DNA, 237 bp, Sorghum bicolor
  unsure (1)..(237): unsure at all n locations
gatgtggtgctgcagtaggcttttgctgggaacgggagtccaagcaggaacactcgtgaggtatgatcgagactgaatgtacataatgcgggggcgtcatttgggccggaatattgtccgctacgaatatggtgcacagattctgtatttgctgtatctaacagagcagagaagccgccatgatcgaataattagagatctgatacangggtgtcttgaaatagttgatgacgaact

SEQ ID NO: 461624 - DNA, 465 bp, Sorghum bicolor
  unsure (1)..(465): unsure at all n locations
cgtccgcggactcctctatactgcattcacgcaccgttcttataacactatcgagcttcgttacgacatcgtgtctaatgtgaggagacatatacgttaacatatctcgcaaggaactgcactatctatacaagcatgtgatcgctgacatatttcaggatgaactggtcactgcgctgtaagtattgttagatcgaccattagttgtctcagacctgtgcaaacattttcttcaactttacgactcctaccatnggcttaaatctgtttttctgttgctgtagacttttgttgatgctgccatggtccatcttgacatagacgaacatgcttctaccttagatggctcaatgtatgagactgactaggtttgtacacccataaaggctgtcagctgtcatgggttgtgaggctactaattagttagacttgtagtttggattagccatctaatgagtactgttc

SEQ ID NO: 461625 - DNA, 152 bp, Sorghum bicolor
caactaacaatcacatcctgaagatctttatgctatagtagatataaattgcttcaatgggagccagatcagatcattacgagccgggaaaaaccatcacggaaccgattatacaatggtactcttcaataccacttttcgataaatgcaat

SEQ ID NO: 461626 - DNA, 399 bp, Sorghum bicolor
cgtgcgctctcgaactgatggacctcttgaggttatgaacgcattaactagggctaagccatttgtcagactctgggccgtggaactttatgcaactatgctatccaaggtaagacgttatggagtgagtgataactgcgtgcacgcgctggcgaacacggatcctgtgcgtaacaagttctgaagtgaaagttgttggctgatcgaaagcagagatctctatagccggagattgattcttgctataacaaggagtaatacatgctgcttgcattgaaacgtcgcaaggttggctaattcatggtagatgggcgctaaatgcaatatccggaggaaaagaatcacctattgtggactgtgaagaatggaatggtcacccgatggtaatgggtggtcata

SEQ ID NO: 461627 - DNA, 427 bp, Sorghum bicolor
  unsure (1)..(427): unsure at all n locations
cgtgcgctcagaacattttatggagatacgatttagcatgtcatatgtggagcacgttatataatcagatgagtactatcagatggatttgagggccttgcaactaaaaatcacatcctgaagttcttgtggttctagtagatataaggagcttcaatgggagccagaacagttcatttagagctgatatgaatgatcacggagatgagtatacaattggactcttcagtaccactctttgataaatacaatctggaggtttcttttaaggagacagggagagtttgattncatataaggcttacatcctcaagttcatgtgcttttaaataagttggctttctttgggagtgaaaacagttcatttagagctattatagacatagtcatggagatgggtctacaattcttttcaatatcaaaatga

SEQ ID NO: 461628 - DNA, 538 bp, Sorghum bicolor
  unsure (1)..(538): unsure at all n locations
cgtccgtgatgatcttcaaatgatggatagcaccagttggataaaactattcagatgcgtgaggaccttgaaaatgaggttaaccagatgaaggataaaatatctggaaaagaacagcacattgcagatttgcagaagaaagctcagaaattagaggatgaactggatgccgcgcggaaagtctcttcagaacgacaattagctgttacagacctgtacaaacattttcttcaacttcaagactacaacgatagggtcaaaacggctgaacagaggctgcagtctcttgttgatgctgccatggtcgagcttgacatagccgaagatgctactaccagagatggctcaatgtatgagaatggggtggtctgaacacccaaaagggctgccagctgtcatgggttgtgaggctactaatttgttagacttgtagtttggatttgccatgtaatgagaactgtactgtaactagaaacagaaaatgttatgtaaggggccagaaaatgagtggctgcacatntttctatttctttccaag

SEQ ID NO: 461629 - DNA, 540 bp, Sorghum bicolor
  unsure (1)..(540): unsure at all n locations
cgtgcgggagcatcgtgctgatcacctagggtttcacagagctntatgtgttcttatgggttggaattattccgtagcccctgttcacaaaaccgcttaccaagcattatcaactatcgacgctgaagccaatcaaggagaccttatcttatggccaccgacagttataattgagaacacatacaagtcaaagcacgatggacaaaaggatggcatgagtgataaagatatggagagcaagctgagagaaatgggctttgtcggtgtcgatgtgcagccactccctgggaaggacgggcagaggtccatgcaagctaagtttcctgccagccttgatggtctgaacaatgcgtcactgctcgttgagtttttcgagcgccaaggccacgggcgagcagcttgggctcgcatccggagcatcgtccctgccagtgatgggggcaataacaaccccatgctggtcaaggtggacggcaagggtgagcggacatgggtcctctacggttaccttgccacggcatgggacctggacattctaga

SEQ ID NO: 461630 - DNA, 190 bp, Sorghum bicolor
tgatcgtccttcataacatgtgcgcacactgaatggagagtgggacgcacactgtaccggcgcattatgcgctgccagtgcggtggttacgggcagacgcgactgatgcactggacagtgtcctagatgccgttgatactagtgtgtttcgtggctttctggccacgttggacgattgtactgggcatgc

SEQ ID NO: 461631 - DNA, 538 bp, Sorghum bicolor
cgtccgtgtacatgtgcacggagcatgaatcagccacagactgatctacatgactagacacaggcttcaccaagcacatacatccactgctgcgagagcgtgactattcgaagtcaggcttacactacttctgctgatacctcaccgatccagctgtgcatggtgcagcacgagtctagcgagaagctcctcgacgtcctctccaccggcagatacatgctcaacctctacctacaaaacctgctcgaccagtcctagctaggcagctagtattagtgccttagctactgcctgtctgtctgtatctgtgtacatcagcatcgcttcatcactctataattctaccacgctactgtatatatagctatctagctgtaaataacaatcaattggttcggctcctcctgctatgtccatcgaacacttgtcccagtgggtggtggacgatcatggccgatcatgcgtgaaggggatagtgtcttcctgcgtgcggctctgtgtaactgaaaaggctagattgaggcataaagttcagtat

SEQ ID NO: 461632 - DNA, 251 bp, Sorghum bicolor
  unsure (1)..(251): unsure at all n locations
ccacgcgtcgcaaattccaattccttcactttctcccttcgtctntttgttgttgggatcgattgatcgagtctccctagattggccttccgtgtccctgcctccatcagaagaaattctcctgcttgtactaggcatcccgctcgccgcctccactgaaatggaacgggcccgattggtagagtatgtgtgatggtgacatggagttcacttatgtaattaccatttcagtaaatcaatgttcttgcngg

SEQ ID NO: 461633 - DNA, 580 bp, Sorghum bicolor
  unsure (1)..(580): unsure at all n locations
cgtgcgcggacgcgtgngcgagaagatacggtttctgagagggcttcagttgcttctgtacctggaactcctacgccaatgtcaaggcctacgaagtgcacctctgctacaggtaccaagatcaactatgccacctacaccatcagtccaagtttctccgttgctttcacgttcactgactgtgtctgaacggccaaacaatgagccttcacctccagccccagtttatgtaacacagacatatcgaaatgcaatccttggtaagggccatcttgatactactccagcaactcttgagcaatcaacttctgtttgcccaaatactgcagtttcacagccatggtcagcatatgcgatggcaacatcagtcatggctcctttcgaaaggaatgaccaattaccaggtaagcaaggcttcgtgtttgggcctagcagggcagaagcccttaataaccggcactcatggaaaggtaacagtgatgttaacggacatacatggaaagatgatgttcctaaccagcaaatgaccaattgtgatgcgcatgtgcaccactcaaaagatatttcttatcagcaatta

SEQ ID NO: 461634 - DNA, 242 bp, Sorghum bicolor
tcgaccacgcgtctcgcagctgcagggccggggcgttcctctacagcagcgcgttctcgtcgcggacgctgggcggagcggccggccgccacggggcggtctccgtcacgctggcagggttcagcggatcgacgggagcggactgcacatggggtgagctggcgcgggcgtgcgcgtcgggcacggacctggccagtcgggcgcggacgcggcggaaatacgacggagacacggcaaaccaa

SEQ ID NO: 461635 - DNA, 420 bp, Sorghum bicolor
  unsure (1)..(420): unsure at all n locations
gtgcgaagctgaaaaatctgcanaacaggctcgagcaggtgtcaaaagatgataaggctgcaaagttggaggctatgaaccggaagaaccgtgctgataacttcaagaatgcttcagaaatgaaacctgtaaatacatctttgaaggcaggagaggctggttatgaccctttctcaaggaggtggacaagatcaagaaactattatgcatcaaagccaggaggagataatgctgaagaaactgccaacgggtccagtagtgatgtagtgcctatcaatgaagatataaagagcaaggctcaaactggtacagcagccacaacagcagctcaagtggcagcagctgacgccgggaagctcactgataccaatgcaccagtggatctgggaacagaatcaaatgtactgcatacatttgagc

SEQ ID NO: 461636 - DNA, 596 bp, Sorghum bicolor
  unsure (1)..(596): unsure at all n locations
cgtctcgaaattccaggtatttcctcaaggttgggacataacttactgcttgagatatcttgaggaatttcaagaaatccatttctggtgggataagacatacaaggtgatatgcctttcttactggtgttcaaatcctataaaactcttgatatgtatcttcttcttaggaccaaaaataatctgtgtgtatatttttacattttttttggttagtaactagcagcttaattctaacatggcctttattttggtaatttatctgactaatttttgttttccattgaacagggtggcaatgactatgagatatttgaatctgaaagaacagttggccatacaggtatgctggctgtatgggaaaggctgatattcttatgcctacgaatttgtaatgtcacctaacaagaatatggacatagcttaaagagagatatttttagttctccttagaaaataaaaataaataggaaacgagagcatcagtgcaaaatcaatgtggtttgcctgaaatttttccgcagaatttaatttaatgttaaatgatacctctntcatcatcatagtagttgcataatacaattgctactcactca

SEQ ID NO: 461637 - DNA, 57 bp, Sorghum bicolor
acacggaccagctggtgttcacgggcgccattcgcgtgaggacgggctacgagatcc

SEQ ID NO: 461638 - DNA, 510 bp, Sorghum bicolor
  unsure (1)..(510): unsure at all n locations
tcgattccgtcgccacgcgtcggaaggcagagcactttggaaactctgaacagaataatctactcctcaatcagggtggtcggtctatgcagacatggaagactttactatgtacccttcttggaatgtgaatcaaggtataagtggagatggtgcaatgatgataccgcaattgacagcggatctagaaaantgacagtgtacacagctatttgtgaagggtgtcagtcagcctgggctgccaagtgtcgtgcacagtgatacctgatacggaattatggaggccgaagcaacagggctgtttgtatttgtctatgttggttgttgtctgccaaccggctgttatacgcgtgcgtgcgctgaggccagaatcaactattgccctattgcctactatatagttgcaattctggagatttctatagcctacagcgggaggatcaacgggaagaattccagaaggcagtggtttagttgggcctgtngtaaacaaacatatcaatgccaccg

SEQ ID NO: 461639 - DNA, 251 bp, Sorghum bicolor
  unsure (1)..(251): unsure at all n locations
atacataccagatgtaatngagctctngtcaagatggaaaccaagactngcttatgagatgtacatgaaggcttgcagccaaggtcttcagcttcctgcaaagtcatatgacactgtactggaggcgtgtaaggcttatggctccatagtagatctaactactttgggtcctcgcccttcaaaaggggtggaacccatcaggatagagaataacttttccagtttctctcaattcaaggatctgcctagca

SEQ ID NO: 461640 - DNA, 134 bp, Sorghum bicolor
cgtccgcgccctccgtctcgcccggcggaccccgccgagcgcatccgccgccatggcctccgacgcgaggctctacttaccgtgccgcctgccggagctcctacctacgacggtgctgatgcgccagatgcccc

SEQ ID NO: 461641 - DNA, 423 bp, Sorghum bicolor
ccgggcccgacccacgcgtccgcccacgcgtccgcccatttggaggatgagcacccttttgagtctaaaattgtgtcttgccctgtttgcttggctaggatttcgaagaacttgttggatcatataacccttcagggtggctacctatttacactgcagagacatcacagagtacgtagagttactggtaatggcaaccacaatctctcctatgcagggagagatcttcagcttcaagagacctacttaaaggtgcttcttggaaatagcagtcgaagcagcagtaccaatgcatcaagtacagtcactgattcactgctatcctcgctagttttaaatctatcttcattagaagtggaggacacgtcaaagtcttcagcttcttctgtggtggaaaataaatggtttaaacgatcactacct

SEQ ID NO: 461642 - DNA, 107 bp, Sorghum bicolor
cgtccggcgccgccgcccgcctgatcaatggagctctccgtcgtgccatccctctcactgtccccgcgccgcgcccttccggcgctcccggccaggagggcggcgcg

SEQ ID NO: 461643 - DNA, 362 bp, Sorghum bicolor
cgtccgcggtgattgaaggtaagtatcctcgagttttagggaggtgtcgttgaacttgtacccggtgcccagtacagaggactaattctggcgtgctaggctgagaaccaccttatgtgcctgacaatgttgcagtaaagctttagttcaaaaaagtgtttcttcttccagtcctgacatggagcattgggggatttttcgccccggttgaatgatcctgagtttgtaaaacaactggtgaggtgtaagcgtttgtccagaaacatgtttttttctcccatctcttctgccccttccatagctccatatgcttccatgtgtacattgaactaaaagaaaccggcatgttggaatcatgaaaa

SEQ ID NO: 461644 - DNA, 409 bp, Sorghum bicolor
  unsure (1)..(409): unsure at all n locations
cgtccggnggagcagaagccggcctgcctgatgccgcctctcgtggaaacatcgccggagttcgcctccggcggcttggcggaggcggacgggctctcagggttcgacgtcccggacatggagctcgctagcttcgcggcggacatggagagcctcctcatgggagtccacgacgggtttgatgatctgggtttcttggacgaagagaagcctcaggtgaacgcggacgcgtacttggaggccatggcggcgccggtgcctgaacgagaggacaagaaaaggaagcggccggagatgatactcaagctcaactacgatggcgtcatcgcctcgtgggtccgtgacggcggatcgccgtggttccacggcgagcgttctcacctcgatccttacgaggtatggtctgact

SEQ ID NO: 461645 - DNA, 389 bp, Sorghum bicolor
tcgtccgtgtagctgcgctgcaagagttaaagaaatctgcacctgcctttctggagactttagtgcatagttgggtctcagctttattttcaggcgacccagggtgtgtttctatcaatgccccatcatgttcaatgcatgacatgatgccctatgtcagctcgcggaagctacacttactgaacataatttgcagaaaagtaatgctcagcaatcatgcacagcatggtcctggtgctgaaaacagtaacgaggaaacaactgatctctggaacactcttttggtaaggagtgaaacagaactgagagagaggctggtgggtttcacctttgctgcagtcctgaaacggacagcaagcttgttcaatggtacctctactgaaacttgc

SEQ ID NO: 461646 - DNA, 276 bp, Sorghum bicolor
ttttatatacacgaatttctgaataaaatcaccgcataattcatgacaatagcactggtcactgcagtatttacaactacattttccatagtaagattggaacgttacaccacaggtgcaagttattggatgcaagtattcggctacacccgttgaattattaacatagcatgaacagcgattggcagagttgacgcacacagcacacctgatgttaagctaaactgttaaagctgccgacaacccttccaactgtgattgatactgacagacgat

SEQ ID NO: 461647 - DNA, 167 bp, Sorghum bicolor
aacgctcacttcctgatgctccttatcgaggatacatggtccgcgttcgtcttcatcggcttggccgaagccgacggggggtcagggttggacgtttcgctaatgcgagctactagcttcgtcgcggacatggagagcctgccatgtgagtacacgacgggttgtga

SEQ ID NO: 461648 - DNA, 470 bp, Sorghum bicolor
  unsure (1)..(470): unsure at all n locations
tcgacccactcgtccgggacctccagctacggcggcaagcacggcggcggcgggggcggcggcggaggctgcagcttcgactgcaccaaacgctgcgccgccacctgctgaatctctgagcgcatatgggtcctgatggtttgcaaaggatggcgtggccgccctagttaaattagctagctagctagctgaacgcgaagctcatatactactttactcctcgatctactactggcatgcagtgtgcggtgctcggctaataccaccatatggattattattattactaatagtagtatcgacatagttgttggtttctttgctcttgtgatcgattgtgatgagaccatatatgcatgtgtgtctgtaaatttgatgtctgtctgtcggacttttttgatcaataataagaggagatgaataaagggtttagttcgcnntanaaaaaaatttatattaaaaaaataata

SEQ ID NO: 461649 - DNA, 438 bp, Sorghum bicolor
  unsure (1)..(438): unsure at all n locations
cgtccgaaaaaaaaaaaaaaaaaaaaaaaattaataaaaaaaaaaaataatttataaatatatattaataatatataataataagaggggaaaatggttaaaataataaatatgagtttataaataaaatatataaaaaaaatttataatnggggggggccctttctggttttaaatttggattccttaaaaccaattggtttttttgatttcttcaatccaaaaaagttttttttttttttccccttatcggttaaaaattttttgatttccgtttttacaagggaattttttattttttcaaaagggattgggcatttattttttttccgcattggctaatttttttttttaaaacaaaaaaatcttttcaccctgtttttttaatttaggttttatttatttaccttgggctcaaataaatttttttttttttct

SEQ ID NO: 461650 - DNA, 333 bp, Sorghum bicolor
cgtccgggcgccggtggtgatcgcgtcagacgcgctggacatgctggccggcgtggcgatggccaaccggtcccttgggggggacggactaacagcggcgtacaagtgggacgcgcgcccgcgcttcgccacgtgcggcggttctggacgagtagagtgcatgtgcaaacaatggcctgacggagactgcagttaaccgacctgcaaaacgttcggaacgatgccctcccgaatgtgttgtcaactcgggtaacggatgcgagatctgcagaagcattatttcacatgaggagaggtgattgatgcaagcgttgggcatgataattggacaag

SEQ ID NO: 461651 - DNA, 473 bp, Sorghum bicolor
cgtccgaacaaacaaaagaaataaaaactgccactaacaccgtactcgtccgaacaagaacttagtagctagtaatactaacatagcaagcgcctccggtgcgacggcgtcaacaacaacaagctacatgaagggggcggcctttctagaggaacaaatattacttacccctccaggccaccgtaaagatttttttaaagtaacccaaattaaaatttgcgggccgaccttttacaaccatgaagcgggaaaaacccgggacttcccaaactaaatgctgtgggaccaaatccccctttccccagttggggtaattacaaaaaaggcctcaccgttcgccctttctaacaatttttcacccgagaaggcaaagggggccccccctatatcgagacattaacctcgccgggttgggaggattcccgccactggaccattaaatttctcacccccctaagccccccctatttccc

SEQ ID NO: 461652 - DNA, 326 bp, Sorghum bicolor
cgtccgcagcaagcttgctcctctccgtgtctcttctctactcttgtgtgcgcgtgctgtgctgtgctgccaactagtggcggcgctgctaattagttgcccggaattaattaatcgggcctagatagctccctccctcgcccatttgtttgctgggaaagttttgtaattagtggccgtccccgcgaggcgagggagctgatccgtgcgtgctttactgttgatgctgtgttgcttgtatgtatggtagcttctttgcttgtactacattagtgttgtactgagtgatgatgatcagtgaaacgattcttcactgttccaagctt

SEQ ID NO: 461653 - DNA, 185 bp, Sorghum bicolor
  unsure (1)..(185): unsure at all n locations
cgtccgcggacgcgtgggtgacaaacctgttgttgttgtcacactgctgtattcaacgccaataactatgtcnagaccatngatacagcttacgctcccatcgccagcaggtgataagacactctgatctgactcaagccgaggggctgtcgcgctgctaccaccacagctccgttcacctaagc

SEQ ID NO: 461654 - DNA, 364 bp, Sorghum bicolor
  unsure (1)..(364): unsure at all n locations
cgtccgttgttttactaattactactccctccgttccgaattataagacgatttggcttttctagataaatttcttttgctatgaacttagatatatgctatgtctagatacacatagtaaatgcaacgtatcaaaaaaagccaaacatcttataatttgggacagagggagtattgctcttgattagaaggattctgacataattctttggtttatatgtatagtcaccaaacgtaatgagctgaagaaaaggaagcattcaggaggattagggcccttctgngtgaagttgggaagcaaaaggcttctgtacgaagcgctttttgagcaccgtcgtcagaggaaaatcaaggggtccggaga

SEQ ID NO: 461655 - DNA, 368 bp, Sorghum bicolor
cgtccgcccacgcgtccgcccacgcgtccgggaatgctgaacaacgagggaatgaggacggcagaaagtgacatcctgtttgagtttattaggatacagataactgtactcagtgggcaatttctggagaataacatcattgttttctgtcatgcataaaagctgtcgatgcatagctattggaataatgaattgatggggtggaagtttcgtggtaatccagcatctattgattatggacagaacaccatgtagaataaagggagacaactgcacagcatcggatttgctgaggaccagcgaatacacgacatcgttgaagctattattgatgctagccggcaagcttacagcataggtgatagctt

SEQ ID NO: 461656 - DNA, 316 bp, Sorghum bicolor
cgtccgtccacacgtacggtgagtgtctgttaccttatagcccctgcacaagtcaatcaaagaggtcagaacggcagctctgatcgtggattctgaattgaaggctttacaaacatggaaatgttgggctccatgcaaaaacagtcctttgacagtcttagacattaatgaccggctgatgatgaccgaacgtgcatgttactgactctgatggactatctggacagtcatggtacaagcacactgatatacgcacgttaactgcacaacgactacggggctgaagggcattcaggtgtcgatcactccattcaga

SEQ ID NO: 461657 - DNA, 309 bp, Sorghum bicolor
cgtccgatacaccacaagtcacaaacacatacactacatatggggctcatctgacagcatgtggtaacattgaggaacccacctgtgtgcatggtgcgtgcgaccaatactactcatcaaggccctgatggcaccccgagcattatgaagctgtttgtatttatgcacagaggaccacatcgtgtgctccatatgcggagcagaattaacagcttcatgtcactgagcaatggctcattaccacctcatgcaagcaaattcaatccatgcgtgcgtacatcatacacggtacacgggaatgcacacgcc

SEQ ID NO: 461658 - DNA, 496 bp, Sorghum bicolor
ggtcgacccacgcgtccgaaaaaaaaaaaaaaaaaaaaaaaaaaaaaaaaaaaaaaaaaaaaaaaaaaaaaaaaaataaaaaaaaaaaaaaaaaaaaaaggaaaaaaagggaaaaaaaaaaaaaaaaataaaaaaaaaaaaatatatggtgggggtctgcactttttttttttttttttaattaatttattaataaaaaaatataaaaaaaaatgttttataaaatattatttttttttaataattttggaaaaatatataataattaattatattaattgattataataattataaaaataagaatagttttttatttttattaaatattataaatttattatttttttgtatttttttatataataataaaatattttttatattgtttttaaatatatatatttgtgttttaatatatttattattatattttttcactatattaaaatttattatatattatataataataaataatatttttatatttttt

SEQ ID NO: 461659 - DNA, 198 bp, Sorghum bicolor
aattattgaggaggacttagagccattatttaatattctcaaacaattatttaaccaacatgagaacgaccccctatttatatattttcctcacaacaaaaaaaaaaagagattttttaactattaacgaaaaagataaaaacacttggaaacacattaaaacggggaccctctataaaaaacaataaactatttttt

SEQ ID NO: 461660 - DNA, 345 bp, Sorghum bicolor
cgtccgccgtcgcctctccagtgttctgccgcattaccccctagccaacgaactgtcctcatgccttcctccaccagatccgagcccaaggatcagccagtacatctccaccaggaagaaaggtgccataaaatggtgtaattcgttgcttcaaatagtagatgctgcactttgcaagttcgccagcaaaactgggctacactatgagcttcataccatatatggtgatagcttactgactgatgaggacttctatgactattatcatatcaatttcatggggctaccaaaagacgatcgcagctctagttctggtgcaaaacctgtacgtgccctggttttctt

SEQ ID NO: 461661 - DNA, 248 bp, Sorghum bicolor
cgtccgattatctgttttgtcattacaaaaggtgcatagttaccaatgacaattataaggaggactgcgtatcattgtattaatagaaggaaaaagtagccgtacaagactcaacacacaacaaagaacacacacagaagcacccacaagggcacctagaccgcctcacacctcacttacaagctagcagaaaagagacactcaagactgaaaaacacccaaagcccactaaccaacatctagcccct

SEQ ID NO: 461662 - DNA, 215 bp, Sorghum bicolor
cgtccgtcgacctccgcttcgggatcgtcttcgccggcaactccgggtccgccgccgaggtcggctgcgtacgagaggtcgtgagagcacgagcgcctcgccgacgaccgcttcttcctcatctgcaagggccagcagcgcttccgcgtcgaccgcgtgctgcgcaccaagccctacctaatctgcgccgtacagtggctctaggacccgccgcc

SEQ ID NO: 461663 - DNA, 380 bp, Sorghum bicolor
cgtccgcggacgcgtgggctgaaaggaagaggaaggctagagaagaagaggaagcacggcgagcacgggaggaaggggagagacgaaggcgggagagggatagggaccgtggcagggaccgttacagggatagatataagcgccatagacactacgactaccatgacgagctatagatcatgtgttttgaaatctgcacgttattggttgtctatggaactgggccttgatgattgtgtcaataaggtgtaccacttcagggcgagcacagatgtttgaagtccttaaccgtactgttacagtcgttgagagcacacgcacacgtgcagaaacttgatgttgtacacacgaatcaagctgaatttgtgatttttggcgat

SEQ ID NO: 461664 - DNA, 258 bp, Sorghum bicolor
cgtccgattgtcttatgtgctcacggtgagatgtaaggaagaacgatgttgtatatgtattagccaattttatagcaataccttctcagtataaagcaactcagggcctctgacctgcaagcaagtatacacagaggattggctgttctagagattatttcttgttcaaagaaatgtacgtagaaaatgctaatgatgcgcgcttgacatctctcccaaacggtgagcttgaagtctactggggttggcaaaagcact

SEQ ID NO: 461665 - DNA, 396 bp, Sorghum bicolor
cgtccgtgaggtgtctaccagcaccactgtatgtgtgagtcctctccccaagcgctctagatctactgtcctaggctgataatctacttctgctccagcccttttgcttttagatgtcctcagtgaggtggcggccttgactcccctctcttaatctctcaattccacatctggtatccttcaacaaggtacaggcgtcatcttctgatttctttccattcttctatggttccattcatgctggaggatgactcatgatgtggaaccatggagcgacagcctgcacaacgcacatgtgggtaagcagcaagcagtaagccatatccattttgttttctaatctggctcttcaaattggcttgatttgtacagcctcatgtgctcgggcctacaact

SEQ ID NO: 461666 - DNA, 464 bp, Sorghum bicolor
cgtccgcgcacgcacgccgtggcgcgcaaccgcccagtctctcgtgcgcgcgcgagcgcacagagcacagcaagcaacccgatggcgctcctggtgctgctaggctgcgccacgccagccgttcacgcggtccctgtggcggggttccagatgatcccgacgacgatgaggtatagatagcttgtggcaaatctgacctaattggttgttatggaactgggccttgatgattgtgtaataaggtgaccacttagggcgagcacagatgtttgaagtcttaacctactgttacagtcgttggagcacacccactgcagaacttgatgttgacacactaataagctgaattgttattttgtcatgggagagatgaccatcgggctgtactaatttcccattgtaggcaatttagctgtaatatcttgcatatcatttacttgaaaggtatattctgctgatacttg

SEQ ID NO: 461667 - DNA, 377 bp, Sorghum bicolor
cgtccgcctcatctcctcttctccccgatgctaacgctactgctcgtcaatctcccctcccacacggagtagtagaaaaagagagaatcccatccatcccggttccttgattcggcacaggcccctcggagaccgaatcaaaccccatcggaggagttggattgcttcccggaggtcgcttccgtctgttaatcaagaaatcccaaacttctcctcgcccgaatccgtgcgggcttggtgaagcagggtaaattgggccaggagacgtcggtcccgaccacgaagtccccgtccctcgccggaattccaagaaagccgccgccttccggccgttcttgttggtcgggggagataaagggattggtgccattgatccg

SEQ ID NO: 461668 - DNA, 474 bp, Sorghum bicolor
cgtccgtacaaacatgaaacatacggggaacagttgtaaagaaacaatttcacaaattcaaagtaaccacagctctggcattagaagcttgtgcatggacacacatcctgaacccatcgtcgaaactactgactttgggttggtcaagagtcaaaaccatggactcaacgcagatggactcaggttttaccctcttttctcattatctgttcctgcccagcatggcatatgctgtagaaaaccaggcttcgtcgaaactacgtcgtactacaattcgttgccctttttctttaatttttctctctcgatcaggccatatatgtatagcctgctacaattatttcgttgccgccagcacaatcatcagcttggtcaaatacatgcacataatgctacaaatttcagatcttgggtggagtcgttgacctgcctgcgttcttggtttttttgtttccatgcatgcatgtgcacaca

SEQ ID NO: 461669 - DNA, 91 bp, Sorghum bicolor
cgtccgaaaaaataaaaaaaaaaaaaaaaaaaaaaaaaaaaaaaaaaaaaaaaaaaaaaaaaaaaaaaaaaaaaaaaaaaaaaaagaaagg

SEQ ID NO: 461670 - DNA, 275 bp, Sorghum bicolor
  unsure (1)..(275): unsure at all n locations
cgtgcggagaggaggagggggggtctcttcgacagttctccttggcttgcgcttcgcgcatgagctggtgctattgacgcacaggcgaccgtggaccgtcgcaggaatcgagaaccggtacttcgacctgctcctcgtccccattgcgctctgcctcggcgccacgctgctcgccgcgcaccgcccaggggagcccacgccgcggctcgcccgcgcggcgggcctggcgctgcanggcacgtggatgctgcagatgggcttctccttcttcacca

SEQ ID NO: 461671 - DNA, 353 bp, Sorghum bicolor
gacccacgcgtccgatgcaagtctaactataagcatacacccactgctataagcagtacagtagcgctttataccatgcactatttccaggagggattttggagttactgtatataacgtgacttttggctaacttgtactacgcattgcaccatttcttcttcaagcacgactgctagttctactatcactcttctgctaagtatgccattgcctaagtttatccagtggtgatggcctactatctctatacgatctatggtctttttcattttatataacgtatatctcatttttcgttccttaattatgctgaatttcttcattcacacttctcatgtattttttatttt

SEQ ID NO: 461672 - DNA, 351 bp, Sorghum bicolor
cgtccgctgacgcgtgggtttcacaatacgcgacgcgatgtgcatcattcatggtgatgagtgaggaggagctaccactatgctgtgcaacagtacgccggccgggctgcatgctactgtaaaagcaagctcacagaccagagctgctcggctcggcattagctgttgggaccactggcacgagtcctgcaataggtgggtccgcggcggtgtctactccacattttatgaagcatgtacatcaatgatgacgtgatagagacatgcgtgaacgactggtcggtctgggctgacacgcgagaaacctgagggcgtaattgcacgctgagcgggggaactgacagcgggcta

SEQ ID NO: 461673 - DNA, 69 bp, Sorghum bicolor
cgtccgaaaaaaaaaaaaaaaaataataaaaaatataataaacaaaaaaatttaaaacactttttcact

SEQ ID NO: 461674 - DNA, 496 bp, Sorghum bicolor
  unsure (1)..(496): unsure at all n locations
ccgaatcccggtcaccacgcgtccggaattctctgctaccaaaccgggagtcccaacccaaggcagcggcagctcatcaccggcgcgcgatggcggcagcagctgtaactccaggaggcacgggcggcaccggtgcggcgacaagccggttcgcggcggcctgcggggctctcagccactacgtcaagcaagcggccgaagccgagaggaagcacgcgaggccggcagccgtgcccgtgcggcctctcccgctgatgccgggcgccgacgtctccgactactgcagccgcgacggcggcctggaccatctggctcaagcggcgcagatgatgaccatcgtgtacggagggcgcgtgctggtgctcgacgacgtcccagcggacaaggcggcgggcctgcttcggctcgccggcgacgccaccggcgcagcagcagcgcaagaaggtgcaggtacagaggcgacnggcggtgccatgcgcgggagagggcaggtctc

SEQ ID NO: 461675 - DNA, 53 bp, Sorghum bicolor
cgtccgcggctcttcactggtgcacttgatgacataagacgtgctactgacat

SEQ ID NO: 461676 - DNA, 488 bp, Sorghum bicolor
cgtccgctcctcatgcaagaagctcaggataatgaagggctctgaggccaggtgatcgttgatgcataaacagaggctatggacacatcacgacatgggaaacggatcgaagagcacagatcgtgcctgaggaaggagctgtgtcgtggcttgagctctccagtgttgtacaaagagatgtttgtttctgaatccaagagggagaaaggtctctgaagcgtgtatataaatcttagctagctgttttgtttcatgtcaagttttgtatgagcgaaggctgtaaaaaaatgacaaatgaaatgagaaatttgactaaatctggtcattttcctctccacatccttcgaaaaaagttctctcacaggttctcctctctgtatgagataaattactttcctgtcactgaggttttgcataatccctgtcattaccctgagctataaatcaaaatgaacactgtcccaacgcagcgtttattttttcagacc

SEQ ID NO: 461677 - DNA, 93 bp, Sorghum bicolor
cgtccggctctgcctcaccccgccacagaggtgcccgtgctcctccacggcttcacgcccgtctccgagtcactcgtcatcgaggagtacctt

SEQ ID NO: 461678 - DNA, 564 bp, Sorghum bicolor
  unsure (1)..(564): unsure at all n locations
cgtccgaccacgagtgcaaagtgccctcagtgcgctaaacgatttgcactcgagcatattatcaacctctatgcaccaggaaacctgtgggatcgccatatacaggcaccggtgactagtggaccaagtggatccgagactgatttgttgaaacaggtcctggatatactccaggaacctgcgagcattgagaaagagtatggggtgcatttcgatgaaatagtcaagcggtttagactgcctgagaggaatatctgggatgctctcatgcagcatgtggatatgggaaatatttacaatacaattgatgactttcacttcatgccggctgtcttcgaatggcatccttctgtacaacaatcttattatcaacagagagtgttaacattgcaggcacccgtgactagtggaccaagtggatccgagagtgatttattgaaacaggtcctggatatactccatgaacctgcgaacattgagagagagcacggngtgcatgttgatgaaatagtcaagcgattcaggctgcctgagaggaatatcaaggatgctatcatgcagctt

SEQ ID NO: 461679 - DNA, 223 bp, Sorghum bicolor
cgtccgacttcttgttggtgccagctgctgccatggcggagtcaagcgcgcgttcttctcgtggctcggcttctgcaggtcgtggcggtggcggcggctacgatgggcgtagggtcgccgtgtacataccacgtaaacccactggactacactccggccacatactcttatcgacaactggcataatatcgaaaaggcccataccgatcaaatttatttaata

SEQ ID NO: 461680 - DNA, 301 bp, Sorghum bicolor
  unsure (1)..(301): unsure at all n locations
gggacgtccacctcgacgggccggggctgctgctccagccctcgttcttctgccggggcaccccggtggtgctgcgcgaccccgcgctgccaccggtcctcgtctaccccgtcacccacggcgaggcgccgaccgtccgcgcccccggcggctcctcgctggccaaactggtcggccagacccgctccgccgtcctncacgccatcggcgacggcggcacgaccagcgaactggcccgcatggccggcgtgtacctggcctccgacagccagcatgccggtgtcctttcgaggcctgtctt

SEQ ID NO: 461681 - DNA, 161 bp, Sorghum bicolor
cgtccgcacaaactctccagttatatgggaaagtggaggaacgatggtctttgggagcattctcatcacccgaataacggtgtggaggacgggactcggcggggaatattgactgaccaacctcaaaaattcagatgctgaaggagtgcgacactggccta

SEQ ID NO: 461682 - DNA, 220 bp, Sorghum bicolor
cgcgtccggtagctagcaacatgcgcaggactacggacggcggtgacgacttcaccttcgccgccgcccagccaccacctcgtctactatctgcagtcggcggggcggcgggtgcatgggcccgccgctgctgtacccaatcttcggccggccgaggtccccgccgcgggcttctccggccccggagctggagacggccaccgcgcgggtttcgctagga

SEQ ID NO: 461683 - DNA, 303 bp, Sorghum bicolor
cgtccggaaaaggatccatggataaactaagcttaactgcttatataaggtccaaaaaaaaagtagaaaaagatgtgggtatcagggtgtggtatagatagacaacagagcaaagcaaaaggagccatgtctgaacaaagatgaggtcactggcttcctcatggttcagatcattcagctcaaattactactatttttttttgtcagatactatagtagtatctcattcttgttcactgtgagtctgtgactcatgccaggaactcaaagatgctgtgtttgatgtaaattccagaagttgca

SEQ ID NO: 461684 - DNA, 401 bp, Sorghum bicolor
cgtccggacactcgtgcggatgcttcgaacgctgtatcaagtggtatacaaactgtcgcacacagggtagctgacacggtggaaccgacgctggaacttatagaaggagttgtagatggtggtgtaacaaatcttgcagatggtggtgtagttgatgttgcagatggtggtgatgatggtgatgatctgggtgtgatgctggctatgatcagatgctgaacgacatactgacggtggagttgggctgagcatggggcttgcttggcgtgttgatgggctgcatgcaagtgtgctggagcgcaagctgcagtcagtgctagagccattagtgctgggcatggaacatgatatgtttgttggcgggttacgaggcttatacggtgtggatcagggtcgagagc

SEQ ID NO: 461685 - DNA, 162 bp, Sorghum bicolor
cgtccgcccactcatcacgatgcattcaacgcacgaccaagtggtatatttattgacgcatacaaggaagttgacacggctgaggatactctagaaccgagagaagggggccaaaaaactttcatacaccctagacaacattgaaatgatgatgcaaagatg

SEQ ID NO: 461686 - DNA, 516 bp, Sorghum bicolor
cgtccgcccacgcgtccgcccagtttttagtgaattattctttccataaataccacttgattaccatgattattttttaacttatttagtctttgagctcaagtttatgtttgtacttaccacctctgttttttgtgtgtactgcttagagatacaaaaattatcagaacttggcaaagaacttgaggcggaggaatccacttctggtaacaaagaccaagatgtgatcgttttgccgtatgcagaggtcgatatgttggaactgaatgagaagatggaacatcttgaacagaaagtgaaagaagcatcaaacaccatcagagagaaagacttgaagctttccaagcttcaagtactcatcggtactacagatagggcggcgctggaggaggcaacagctagcatcgaccagttggagacagagctggagcaccatctccaggagaaactagaagctgaaatctcaggtctggtgatgctgaaagcgaggcaaaactggcaggttcgggcagagga

SEQ ID NO: 461687 - DNA, 448 bp, Sorghum bicolor
cgtccgaatgatgtttattcaaagtcttgttccaggaagcagtaaggtttcagcagtttagaggagcagcattggaggtcctgtctttatcaattcccatcggcatctttcagcttcagtttggacaagtactattgctgtccagctacatataaagaacagtgaaagattcacaacaatagaccagaaaggcattgtgctgcgattatctaagcattatgttccatagtggcatcaataaggtgaatgcctctctataatgcaataagtactgtgcgtcaagaaccatagagtagttatctcttgtactattagaaatctttaggctactgctcatgtattgttaggttgtggctcattagactgatactttgtagcctaagttgtatcaaagtttgtaaatgaatttattgctgaaatggatgaaacatgagtaatgtgggagatc

SEQ ID NO: 461688 - DNA, 480 bp, Sorghum bicolor
tcgacccacgcgtgcgtctccttcggctacaccttccaccaacaacgaaacgacgacgaccaccaccaccataccggcgacgccgagctcgtcgccgcgccgccctgcccgagctcgccggtgtccaggcccgtcgcgcatccaccgcctacgaccgcggcgccgcggctgtacccggcgatagagtggccgctgacggaggagataccaatttaccatacaccgctaccactagctggggctgcggccgtcacgctcgctaactcgcggtactaccctcctccaccgtcgtcggcgactccagtggaggtggagccggtcgcggtgtacccgccggcgccagagacgtccgcctgcagcttgtacccgtcggtactgccggccagcgcgatgtacccaccggtagaccttgctccagtgagctgctatccgccagcgccaagatgggatgatctggggttgtacagctgaagtcggcgt

SEQ ID NO: 461689 - DNA, 429 bp, Sorghum bicolor
cgtccgcccacgcgtccggttggctgcttctttatgtctatgttcacgatttctgtggctttaggttggattcaattaaattggccgcatgtgtgcttccatgggtctgaagaatacacttaaatttttttggggggctcatgtttttaaaaggcgatgagattagcgctttaggcttgcgccttactgctcctattttacaaaaaaaatcatgtatttcatttcattcgaactcaaagattaattgcacgtctgtttgtttttaactagagccattttgttcagttagtaagtatccatatgcatttttttagctacaggacttcaaagttttacatttatttctatgttaaacatgtttttgattgcatcatctttgtacagtgaaactgacacatgaagactaaaacaacaatttttgcaaacaga

SEQ ID NO: 461690 - DNA, 122 bp, Sorghum bicolor
acatacacaacttatcctatagagatgatgtaattaaagctttgcctaactaaatgcaataatcttgccgacgctataatcgattcctttcataacgtcaactaagtttaggttcaaataga

SEQ ID NO: 461691 - DNA, 520 bp, Sorghum bicolor
cgtccgctcgtttggcttctcagtttttgtcaccacttgatgctaggaatggtcgcagtgtaatgcaaaggctggtgcctggtcctggtagttctgctagtgtaaatcaaaggttaggaagcagtgcagggctgaatcatgtcaatggagctccaaggattagatcagttgtgagcatacccaatagggaaaggcttgatggtagcacacatactacaccccctaggcccagtgaggattcttcccctgttgaaagcagcggcaaagttggactccctttgactgacactaacaaggctgaaggaactagtgtagagaatagaaaaactagtgaagctccagcgtctaacggttccgtattgtctcctgccgaggacaagaaccagcccaggattgaggataaagatggttttcagaagaagactttctctagaatgcatgatggagagacagtggggtcagctacaaggatacatacccaagagaccccggcctgcacgaggaactgcacgctgaaatg

SEQ ID NO: 461692 - DNA, 73 bp, Sorghum bicolor
  unsure (1)..(73): unsure at all n locations
cgtccgcccactcgtcctntaaaaaaaaaaaaccaactaaatactagaaataatacacaaagtaatgcaaaaa

SEQ ID NO: 461693 - DNA, 272 bp, Sorghum bicolor
ccgtcgacccacgcgtccgaaaaaaaaaaaaaaaaaaaaaaaaaaaaaaaaaaaaaaaaaaaatagaggggcggccgtttaaaaattatcaaaattaacaaccacatgcttccaacgcgcgccctctttttaagggccccctggttctatttccctgcccctgatttaaaacttttttaatgggaaaacccttgtcttttccgagctcattgttttaacccacatcccctttaaccactggccttataaaaaaaacccttaaccaataccct

SEQ ID NO: 461694 - DNA, 132 bp, Sorghum bicolor
cgtccgactgacgcgtgactgatggacctactactttctactggaacagaggactgcactcttacataaactttgtacctggggactcatagcgggatataagttatgttcataattcatttcacctatttg

SEQ ID NO: 461695 - DNA, 261 bp, Sorghum bicolor
cggtcgaccacgcgtcgctcaagtccaagccaagcagcctcagccgaaaggaagtaaaaccgccgccgccaccgagctcgacacggtcgccgcggggcgccgggtgtcctacggtggcgccaacgccaaggccttcaccggaggtgcgcggcgcacgttcctgccgtaccggcaggacctcgtggggctgttcgccaacgtgcgcgggctcagccggagccaccaaccgttctgaagcggatccggtgggccacgacgcgc

SEQ ID NO: 461696 - DNA, 314 bp, Sorghum bicolor
cgtccgcacaaccacctgcgcgtgcaggcacaccgaggtcgccggagccgttctcggtcgtgtcggcttacaattatagggcggccactacggactgacctacaacgaccgcagcatatcatgactactgacgctgtctggtctgtatcaagcacacaccaatgaattgtattaatgaaaactacttcctgctgtcaagctcagactatattctgatgccattgcatatgccttgagcaagtatatgtgtaaactgatgacctcttgttgaatcaccttgaagaagttgaaatcactggatggagaggtactga

SEQ ID NO: 461697 - DNA, 433 bp, Sorghum bicolor
aaccccggtgcgacccacgcgtccgagcgctcgcgctcccgctcccgctgccgccgccgcccaagaagctggccgtgagccccagcagcagcaccgtggagtcctcgtcccgggactcgcccgccacgccgcccagggctcggtctccgtctccggccccgacggtgatgcctgcgccgtcgctcgacctgagtctcggcatgccggccatggtggctgcgcagccgttcctgttcctggacccgaggctcgcggtgaccgtggccgtgccggcgcccgtggcctgccggccgaccgctgttgccgccggtgccaagaagcagacagcaccaacatcctgcggtggatacgaggagcagagtgacacacggaccacagcctctgtggtggacgcctcctcggaagcggtttgcgtggggttgacctcaacatg

SEQ ID NO: 461698 - DNA, 522 bp, Sorghum bicolor
cgtccggtcagcaacagcatcacctcgtgatgccaagggaagcaagacgaaagaaaattctgtggcagcagatgatgtgtattctgatttcgaaagatctactcaaccagacgacgtaaaaaaccctggaaagcagaaaaggaagacaattctcagaaaatttggtgagataatgaagaaaagaaactcctaaactgtaatctagtattatgaattgaaagcagtatagcttcgattttgattgttcagatccactgagcacacaggacagctggaatggcaaagatttacagtgacgactgtgtggggtcatgccatggatttatactacaaagaatggaacatacatgtaaaaatacagagaatgaaataagaaagtgtcatagccttttatgttttttataagtttctgcattttagaatctctatataaaatcttggcctgctatatgcaattaagcagcccaggttcccagattacagtatgcccaaattaccttatctttctgggaaatacgttga

SEQ ID NO: 461699 - DNA, 402 bp, Sorghum bicolor
  unsure (1)..(402): unsure at all n locations
cgtccgagaacactgaaaaagcaattagaatcacaaaaatatcaatgagatcatattgctaaaaacatattgataacataatgcttgtacacacttagtcgttttgtagagaaaatgtggtgatttggataaatgcaatgatttcctattgcttcagacatgcatcttgctttcagttgtcagaaagcaatgatatcatttttccatgagagataaatattgctttgagataccataatgtgacagatgtgttatacaagagagaacagataatatatactgtaccctaaattattggagtgtgcacgtgtaagtgtaactatccagtaggctaatttcaatttggccccgagttagactcctctaatgttgattacttatntatctacgagataaaaagaa

SEQ ID NO: 461700 - DNA, 241 bp, Sorghum bicolor
cgtccggaacgtcacctatcattgctagtccaaagcggccagctaacatagactactctccacggattgaggctatagaatttaccatcgagcagagatgatgtgggctaagcacaaaatcttacacgggcagacattgtacttgccacagtgtgacgtacagggaacacaccatccacaatgtatcgaactgctagggtatacataggtgcatatgcgccaactgtgatgggagagaaac

SEQ ID NO: 461701 - DNA, 99 bp, Sorghum bicolor
cgtccgaccactcgttcatcacccactcatggacactgggtacatacttcagtagttgcattgtgggagcactccagtggatagaaagttgggcttatt

SEQ ID NO: 461702 - DNA, 84 bp, Sorghum bicolor
  unsure (1)..(84): unsure at all n locations
cgtccgggcgccgtcgtctaagctgtcgcagggcatcaagaaggcctcgcggntccacgcgtaccaccgccgcggtctgtgggc

SEQ ID NO: 461703 - DNA, 276 bp, Sorghum bicolor
cgtccgcgctcgaagccgcccgcccatcgcatcgcactcgcacgagacgagaccgccaatcccgtcccctgacccgaacggccgccgcagcggagaagagagggagagttgtgtgcgatacgcacgcctctcgccgccgcctacccttcccgaactcccccgaccaaacgcctcttatcctcccggcatcaaaatcgcgccgaaatctctccggattcgcgtgcgcgggcttgggacagatcgggggcggaggaggccaaggccccgggcgggcca

SEQ ID NO: 461704 - DNA, 320 bp, Sorghum bicolor
cgcgtccgcggacgcgtgggctgcgctgttcgcatttggagcatcaaaacaggggagctactatttgcacagagcatgtcagacactcttttcacggcattttgttggcccgaaagcagccatgacttgtgcagttcttcgctgtttgatctaaaccacagctggggagctaggttgggatcacgtgctgggctgttctatatgcatgggacttgagtgattctgcactagtactactacactactaacttggagccttggaaggctggagcgaaaaatggtgggtgtattctcaaagaacatgggatcagtgaacatac

SEQ ID NO: 461705 - DNA, 277 bp, Sorghum bicolor
cgtgcggaaatcctcaattttcacatgatcaagttccaccgaagaagtcagcctatgctagtcaagggttggctgaagcctgcaaatttgtgtggcgatgatgctaagtttgtaaatgaaagggctcaaaatgacattctattgctttcacgtggcataacaaggctgaacgaacgtgcatgccaggatgctgctgttttgggcttgggggttctcaagcttgatgctcgtgcacgaaaggatacttaaaagattgaccacacttgtgaagagagag

SEQ ID NO: 461706 - DNA, 114 bp, Sorghum bicolor
cgtccggacatgaacagttacgggtcattggtgcgacctctgcgcatctctttgctgtgctccaaggtctcttacaagtgctggcggggatcgacacaaactgcacggtcgcat

SEQ ID NO: 461707 - DNA, 203 bp, Sorghum bicolor
cgtccgcccacgcgtccgcgcgggcggcggcaatggcgatggcctccacctacgcgccaggcggcggcgcgggggcgctcgcgccgggaaagggcagggtccgcggccccgctgggctcggcttcctcagcccatccaaggtcggcggcctcccccgccctctcgccctcgccaagcggagtcccgtcgcggccaggctacgg

SEQ ID NO: 461708 - DNA, 354 bp, Sorghum bicolor
cgtccgcggacgcgtgggagattcctctcgaacatcgaaggtcagcgtgtgtgtgatccatatgccgatcgtggaacccgttcaaaacgcatgtgaatcgatgaaagaatatcgagagtcgtatcgtcagagacaacataggatggagattcaacacatccatgattttatttcctctccgggaccattttctatgagtttctcgacgctatttcttcatgtctgttctacctcgatgactcgatctaatctaagaacacgatgcatatgctttttgcacaggcaccttgagagcgcgtcgtccatgccagcgttcgcgccgacggcgtacctgttctgatcatggcgtcggca

SEQ ID NO: 461709 - DNA, 252 bp, Sorghum bicolor
cgtccgatgcgactatattaccaggtcatatccagtgcggcagacctacacgctacacaacaatcctcgagaattctatatatttcttgcatgaggagggcgctattgactgaactggtgagacacaaccccctcctaattacatgacctcaaactaaaacatcattatccggtcaggatgcaatattaaggcttcttctctctatctacatggcaataggacgacgacaagtctatgttccttggatgcac

SEQ ID NO: 461710 - DNA, 160 bp, Sorghum bicolor
cgtccgcgaagaactacatcaaggcaatcaattcgatgatacgaagcttttatttgactgcatttgtgaagctgtgacagaaattcacgatatagactgttgaagccctccatgcttatcttcttttacacacagcataagggcccctccagcgggacaa

SEQ ID NO: 461711 - DNA, 102 bp, Sorghum bicolor
cgtgcgacaccacaccacaccacatagagagagcgggcaaaaggtgaggccgagaagcgctttagccgttaggcgataagagtgagctggtgcagcggcatg

SEQ ID NO: 461712 - DNA, 429 bp, Sorghum bicolor
  unsure (1)..(429): unsure at all n locations
cgtccgcctgctatgtacaagaagaatgttctaacgacaagatgagagaactcttgtcagcagatctgaccaagttggatgaggccatatgggatacagctgttgagatgaggaataatatcatggcttggagctggacagacgatagcagttcatgtgacattcacaaggtctcacactccatagtaagctacaccaaggtgctgtgggccaattgcaagtcagtgaatcgcattctacatgccgcggttctccgcggtgagtttgtgtcggagaacaaaaacttgaaccatgtgaccaacctcatgacacagatggtctcttcactagagagagagccttccacaaattcattcccggggtccttcccagatgagagcctcaggntcctattcttgatcaacaatttcaaggaaggattatcacttt

SEQ ID NO: 461713 - DNA, 83 bp, Sorghum bicolor
cgtccgaaaatctaaaacaaatataaggtacaatattctatctagattcttctattctcttcttctctgggggcttttctcga

SEQ ID NO: 461714 - DNA, 206 bp, Sorghum bicolor
  unsure (1)..(206): unsure at all n locations
cgtgcgcctatggaaattgtattatactgaaggctactaaaacatggatagctctngacacattctgcttgcagagcaactgtataagcctctgaaaattgcatttctacattcttgagtaatatcttcaggtttataaaagcttggaaatttgacactgggaactgggaaggctattcaaatggggcatatcattttcagagggg

SEQ ID NO: 461715 - DNA, 276 bp, Sorghum bicolor
  unsure (1)..(276): unsure at all n locations
cgtccggtggtagcaggcttttacttctatcgcattgcaactggtagccccaaagatctgaggagcaagagtgattcaacgaactaatgcactgggacgaatcanatgatcactggaacgtagacccagaagactatggtctgttgctttcgatntccttcatcagccgtcaattcaggcaaagttcagttctagcggctaaggtgtctggatgatgacacatggattcagactctggcctcgtcccgtaccccttgggtcctttatttatgtaat

SEQ ID NO: 461716 - DNA, 229 bp, Sorghum bicolor
cgtacgataggctagcagcttgcttattgacaacactgataatggtaatatttattgttgcccgatgggcatttgtgcaaaggaatagcaaaatcagctcggttagttgtgataatcgatttttctgatgatgagtgggaatgagaggcgccttttgggggtttctttatgtgcccagtgtatctggcaagatcataggaaacagaagaattggaatatgttgtatatt

SEQ ID NO: 461717 - DNA, 298 bp, Sorghum bicolor
  unsure (1)..(298): unsure at all n locations
cgtccgcattattgccgtagattgtgacacaagcagataagagatagatgggtgtgcactagtatttctgcaatagcctagttagaggataatcagacagtgtataggaaatacaaacgaaagtgctactattcatattgtgaaaaaaaattggaagtaaacaaggcctaacaaatctaaaccttctgtcgngagcactggctgtctgtcgctgtaaattcnattcttgtgtnngctctttgtatttgtcccaatattaaaagattccggagaccgaatattattgatcaatcttagg

SEQ ID NO: 461718 - DNA, 142 bp, Sorghum bicolor
  unsure (1)..(142): unsure at all n locations
aangngnaaaaaaaataggggaataaaccgacagnctggtgtttatatttattattacacccaaaaaggtgtngcaaaaaattctttgtacattattgtccttagaatacaattgccccgagtcagaagaaggatggttaaa

SEQ ID NO: 461719 - DNA, 227 bp, Sorghum bicolor
cgtccggacgaataagacaaggttcataaggtgtgttcatctaacgtgaatagcttggataggataggcgtctaccaatgggatagcgagcgactgctagatcttgaatgagaaatgttaaaactgggagactaaaaaatatttctttgtagggaccatctaatcaaggtctaacggtgggtcaatatacagacagaaatgtgcactgttggacaccatatcggagt

SEQ ID NO: 461720 - DNA, 289 bp, Sorghum bicolor
  unsure (1)..(289): unsure at all n locations
cgtccgcccacgcgtccgcacaactttatgatatcttgtgcccatatacttcttgaaataatgataaaaacacgttgaattgtctggcaggtcgcaagtgcaacagcaacattcgtgatgatgttctgctcctgcttctttgtggtggagttttactttctgcacagattccgacctccttttggtaaatccacgntagaaatctctaaacattttcaaatgngtgattgttgnaatgtgatgctctgtttctctatctgcagctggctacctcatctttaatttcata

SEQ ID NO: 461721 - DNA, 194 bp, Sorghum bicolor
  unsure (1)..(194): unsure at all n locations
cgtccgcccacgcgtccggcgaaatccatagctttgatgaatcaaggccctcgggcaatgactacctagcagaggtgtgccgagaatgggaggccacggcatgccaagtaaaccaggaggatgttaggcttgagcttctccggattggggttgttcttggcagggacggangtnctctaggaaagaggatcccc

SEQ ID NO: 461722 - DNA, 91 bp, Sorghum bicolor
cgtccgcggacgcgtgggcggacgcgtgggcggtgttcgccgaccggtctgcggagcaaccgccggcgccggcgttcgccaggccgatccg

SEQ ID NO: 461723 - DNA, 109 bp, Sorghum bicolor
  unsure (1)..(109): unsure at all n locations
cgtgcgcccacgcgtccgcccacgcgtccgcggacgcgtgggcggtcgcggctatggatggactttcggngactattanacttctggggcctgggctccacnagttcct

SEQ ID NO: 461724 - DNA, 113 bp, Sorghum bicolor
  unsure (1)..(113): unsure at all n locations
tcgtccgggcgcccacacggcgtgccagcagtgccgcgaccacgaatgcggcggcgaggacncgccggctggcatcgngngcctggagaggctgggggctctgacgaggtgcg

SEQ ID NO: 461725 - DNA, 222 bp, Sorghum bicolor
  unsure (1)..(222): unsure at all n locations
cgtccgaaattgcggagaattttcttgcctgccaaaagcacactcgtggagccattccttgccatcagttagtctgttagtgcaaggcattgtcgcatcagtgatagcgcaccgaactgaattcctttttctttcgaggactgggacgcgcacatatttcgtgcattctggctgggcactgaatggtcatcaacacgtggagctgaggcggcgnngcaagcc

SEQ ID NO: 461726 - DNA, 298 bp, Sorghum bicolor
  unsure (1)..(298): unsure at all n locations
cgtccggtggttcaactaccgcgtggccagggcggcgccggagtcgtgcgccgacttcctcgggagcttcgtcgccgacaagaacaaggcagagttcgtcaagggtggcaagtggctcgtctggaagtttgagggggacagaacgttggccaattatatgagtgaccgcgggttcccgtcgaacctggagccgctcatgttcggacgcgtgctgcanggtctgggcacccatgatcgcgacgcgctggtggtgaagcaggtgatgcggcagctgatcacgtcgctgaagcgcattcac

SEQ ID NO: 461727 - DNA, 120 bp, Sorghum bicolor
cgtccgcctttctcgggcagatcaggagggaggtttgattcaaggaatagctctggtggtcgtggacgaggacgggggcgtggccggggtaaggggggcaatgacgataatggtggtgga

SEQ ID NO: 461728 - DNA, 63 bp, Sorghum bicolor
  unsure (1)..(63): unsure at all n locations
cgtggcgactctcgtcgttctcccgtgtccgccgggcgctgnctgtctctggtggcgacgact

SEQ ID NO: 461729 - DNA, 63 bp, Sorghum bicolor
  unsure (1)..(63): unsure at all n locations
cgtccgcgcggacacagacnaggatacaactccccgtgcggctgggagggagcgcaagacaac

SEQ ID NO: 461730 - DNA, 224 bp, Sorghum bicolor
  unsure (1)..(224): unsure at all n locations
cgtccggcatgccttatatggtagacggaggatgaaagcttagaggcagcccagctacggaaagtgtgcctcctaatccacaaggctgaagtggagcgagatcaccacgttcttgagatnggtttgggctggggcagcttagcaatccaattggtggaggaattttgttgcaaatacgctgtggacacattatcagtggagcagctgnannntgcacagagaaa

SEQ ID NO: 461731 - DNA, 118 bp, Sorghum bicolor
  unsure (1)..(118): unsure at all n locations
cgtgcgatataatctggatttgggctttgctacgctactccgtaacgacggtggactcttgatctgtatggcnnntatcacgnattgcgttcgaggaggttcatcacacaagcagcca

SEQ ID NO: 461732 - DNA, 338 bp, Sorghum bicolor
  unsure (1)..(338): unsure at all n locations
cgtccgctaaggcacaaagagcttgattttaaatttaatttaatatctgtttatggccctgcacaaaccgaacataaagctaacttcttgtctgaattggtgcgagtatgttcaaaggacaccttacctatcgttataggcggtgactttaatattattcgtatccccattgagagaaataacgataattattgtgacagatggctcttttatgttcaatgcagtaatcgacagtctcaacctaagagaaatagagctgtcaggaagaaaatttacttgggctaataacatgccaaatcagacttttgagaaattnnatagggtattagtttgtacag

SEQ ID NO: 461733 - DNA, 260 bp, Sorghum bicolor
  unsure (1)..(260): unsure at all n locations
cgtgcggactagttctatctgatccagctctttcacttggatcagagagtgagaagtctggtggcatctatagatcataatatgttattagagtggaaacacgaggatataaatctgaatgcatgtttaatacatcatgaagaaactgcatgcaaaagtacaaattatactggggcattcttctgcanatccctatggaactaatctttccacaatatcaacaggagaaagttgtgacatggttcgtgattatcccgctg

SEQ ID NO: 461734 - DNA, 177 bp, Sorghum bicolor
ctgtgcgtttattgtgtgcttacctgtggaggctcttttgaaatagtgcaagaccactgcactgtctgcaaacataccggttatttgtgaacatgcacatggtttacaaatagattgtattacagctcaggagatgggaagatttctgaaaaagatatcatgatgatctgtgatcaa

SEQ ID NO: 461735 - DNA, 84 bp, Sorghum bicolor
cgtccgctcactcttctgcatacatctatggcattaagcagcgcattgggcagcagaacgatgggtatctccatgactgtcttc

SEQ ID NO: 461736 - DNA, 269 bp, Sorghum bicolor
cgtccggatctactgtcagcgacgtcgtgaacttctatgtttcaggacacttcgacgccgtggactaccatggtttcatctgcggtataaacggacgtagagatcaacaccatggttgggtggaccacttgtccttgcgcaccctgaacatggaccagaagcttgtattttggatgcccttactcagctagcccgacaaggtccttcccatagacaagcgtaatatggaccccgttaactcctacctctacaaggtggcgaagaccaac

SEQ ID NO: 461737 - DNA, 135 bp, Sorghum bicolor
ccggattccgggtcgaccacgcgtccggatcatattatttgcattgtacatattcaaacagagaaagcttgttaagaggcacgcaccataagattgtcacatgagtttccattggagctacattatgtctgtact

SEQ ID NO: 461738 - DNA, 226 bp, Sorghum bicolor
ggtccggattccgggtcgcccacgcgttcggacctgtgcttcagtcttgcagcggttcacggccgcacctggagcacggcatgcacccgcgggttccagcccagggccagctatgagaatggcgcgcgccgagatccgtcgcgcgaagagcggatgcagactaatcgtgctattttgtgtgtgggaagcgatatcatatcatctgtgcgttatatcgtgcttttga

SEQ ID NO: 461739 - DNA, 129 bp, Sorghum bicolor
cgtccgcaaagactaaggagagctccatttccatgcatgcaaggatccatcgattttcgtcagtcatgcaagctgtttaagaaatcttagcactaataatatttttctagacaagggaacgaacgaaaa

SEQ ID NO: 461740 - DNA, 301 bp, Sorghum bicolor
cgtccggttgcattgcatgcacgactgcacacccaaagcgtgtacttgactcgtctctcctccgtcgttcaatttgatctcgcagcgtgcagtgcagtgctagcacgaaacgacaacaatggcgtacacgaacaaggcggccgtcgtcgtcctcggcgcggcggtggtggccgcgttctttctcgcagctgagagccgcgacatctcgcggcggaaggacctgggcgtcaacctctgctgcagcagccgctgcggcagcagggttggcgtttgctgcagcctgggcatcggcacatggatc

SEQ ID NO: 461741 - DNA, 102 bp, Sorghum bicolor
cgtccgggcgtcgatgctggacgaggtgatcgactacctgaagcagctgagcgcagtgcagtgatgagcgatgcagatgatgatgccatgcatggcatgcga

SEQ ID NO: 461742 - DNA, 267 bp, Sorghum bicolor
  unsure (1)..(267): unsure at all n locations
aaattaccggaaagcactgaatgtcggcacatacccagaatttaaagataggactatgcgctaagcggagcattctggagcacacatcccacttttgtgcgtgctgactttcagggatggagtgccgcggtcgcggccagcggtgcaatcgtcgcgaacaccgctggttncggtgtcgcagcattcagaagctcttgatgctgntggaattgagtggcagatatgtcctggctgatagtagatacgtctacatacacacaaactcac

SEQ ID NO: 461743 - DNA, 301 bp, Sorghum bicolor
cgtccgatggcaagccagtcagataaccttcttgtagaaatcgaaggaactttactatctacactgtctgacaagtcatctggccactcccttacggaccaattaactcacatgacccagaatgactatctacttaatagtgggctggaaggtatagggtctactggaaagaagtggaagtgctcgccgaaaatgattaaaaccactagcgaagaagcagaaaggcaactgtgcacagacatgacaagaggagtgatatgaccagagttcaattgacagtatgataacagtatcagtcata

SEQ ID NO: 461744 - DNA, 385 bp, Sorghum bicolor
cgtgcggtgagggataaatctaccccattttctttctctaatggaggaaatccccatcggggatcggggcccgttgccatcttgagtcttggacgtaatatcctacctaaaaaatacgtctttggtgaacttggaagaatctagaagggtgtttggatgtaggaacctaagttcattagatgtatatctcggatgtcacatgaggtggtctattgagtatccgatacttataaaaaaataaaatattgatttcattattaagtcacgagacttatttgttaagcctaattaatttactattagcaatttttacggtagcagtcatagattaatctatcattaattattaattagatctaaaaggttattttataaattaggatct

SEQ ID NO: 461745 - DNA, 77 bp, Sorghum bicolor
cgtccggatggcactctgcccggcgactattgattctacccgttggggctctcgaccctgaggcacccgctgcttta

SEQ ID NO: 461746 - DNA, 437 bp, Sorghum bicolor
ctatattggctgagaatgattgtgattccggtgtttgcatggaagtttataagaacaatcaacttcatatttttgtggcacaaggcttgttttctcgaagatcaaacgagctcaaggattcaagctggggtgaccagtctctcattcgccaagacagcgctgacgaggaaacagcagacatttgattgctctgggaaacaagatacaatacagaagtgagtgtgggccactcgatcttaatgtaagtgatcaaagggctagcaatgttatgtgtacccaaagtcaaatgctttctgactaatgatttggactgcaaactctcgacaagtgatgattacttcaatgaacaagaggaggaacttaagcatagggtacaacttgaagcaaaggaaagaaagctggaagagattctggaacaataatggcgggaagggaga

SEQ ID NO: 461747 - DNA, 54 bp, Sorghum bicolor
accattcttactgatctgcttaatagcatgggaccgggcgctctaactagcttt

SEQ ID NO: 461748 - DNA, 75 bp, Sorghum bicolor
  unsure (1)..(75): unsure at all n locations
cgtgcgccgncatattcagtggcgtcagcaccagtatttgtgaacaaatgtatgaatattggagggatcttgggc

SEQ ID NO: 461749 - DNA, 148 bp, Sorghum bicolor
cgtccgcattaattgagtacatcccattgttggcgagtcagttaggtgttgggttttttgatgacaagctgggggcactctgcatgcaatgtgtggaagataagtctattcaatagagatgctgccgctaacaacttgaagcgcctgc

SEQ ID NO: 461750 - DNA, 197 bp, Sorghum bicolor
cgtccggaattacaagtttgggatgttctggacttctatgtctcagaaaacttttctgctctccaatttgatagtttgatgggttttacaaatgaagttagtacttcctacaatgattgtatgaatttagttgacatggtagagcggcccgtggctcgtctgtcttagatgatcaccaaccagtacaggtgtgcgtc

SEQ ID NO: 461751 - DNA, 187 bp, Sorghum bicolor
gctgtgcaaggaatctcttgccgcgtggtccgcggccactcggcggacctggtgactcgttacttgctgagccgggcctgagtgtggactgtgacgaaccgcaatgagccggtgatcgaccttcagtctcgcgaaatcaccgtgagctacacggggtggctcacgttcggagtgcagctatcacggc

SEQ ID NO: 461752 - DNA, 75 bp, Sorghum bicolor
cgtccgcggacgcgtgggaaagaagtgtccaagatcttctgtgaccggccgttgtggttccccgtcgccgtggca

SEQ ID NO: 461753 - DNA, 77 bp, Sorghum bicolor
cgtccggtgagatcgacaccactagctaggtcgagaccatggctacagcttacgctcccatggcgagccaggtgatg

SEQ ID NO: 461754 - DNA, 162 bp, Sorghum bicolor
cgtgcgtgcacactgatgcaccgtcggtgccaaccgctgccaaagtaacagaagccgcctcagctcagctcatttctttggactctacagagggagctaccaacagtacatgtaatcttggacacttcgtcgtctaaaatcctttgtatcgacgtataaaaa

SEQ ID NO: 461755 - DNA, 176 bp, Sorghum bicolor
acgcgtgcgctgcaatgttgtagttatcgctgttaatatagtccctgctgctaaccacccttgttgctggtgctgctggtcgacactggccctggttatgcatatatgatagtgtggacacgttataaaacgcacacaatcttgtgcacaaaaaaaaaaaaaaggggggggcccac

SEQ ID NO: 461756 - DNA, 162 bp, Sorghum bicolor
cgtccgccggtctccgctcgctcgctgcccatagattgggaaacagaattatctctctctctctctctatatatatatatatatatatataagatttggatagagaggaggaggagactcgttctagaaccgtctgcggcgtgagatttttgggttccccgc

SEQ ID NO: 461757 - DNA, 78 bp, Sorghum bicolor
  unsure (1)..(78): unsure at all n locations
cgtccgngcgaatacaaatataaaacaacatacctaaacaagaatttctagacactctcattctctatctccaatggc

SEQ ID NO: 461758 - DNA, 476 bp, Sorghum bicolor
  unsure (1)..(476): unsure at all n locations
cgtccggtcgaaggtggtgcggccggaggaggtgctggagtcgctgaagaacgacggcagcatcgacgcgctccgcatgaagatcatcgcccagctcaaggccaacgaagatatgaagaaaaacaccatgatgatggtggagcaaagcaaggtattgaatactcctggagctgagaaaaagaccaagagggagttgtttgatgcacttcgacaggaactggagactccggtccttgagaaagcctccaaggcagtttgggagctgattctagacaatggtggattagggaaagagataactgaaacagttgagaaagtcttctgccggctcagtggaattgacatgatgccacctccacctgcagncactggtgctcgtcaagagaaagatgacaatggctgtgatgaagttgtgaagaagcaagaggtggatgcttttgaaccatcctcatcaaggaagagacccttcagcgaca

SEQ ID NO: 461759 - DNA, 91 bp, Sorghum bicolor
cgtccggtccaaggccgaggagctgggcgtgacgctctcctcgctggagcagctgggcctgctgtccaaggccgaggacctgggcctgctc

SEQ ID NO: 461760 - DNA, 175 bp, Sorghum bicolor
  unsure (1)..(175): unsure at all n locations
ctagccctttttttttttttttttttttttatctttttatacatttctttcatacccatcatattcacggggcggggggagcttttattcaggcgggggantctctaaaaacccccccaaaaaaaaccccccttattcttttttaaaaaaggggttggcttcccccccccccccc

SEQ ID NO: 461761 - DNA, 160 bp, Sorghum bicolor
tccatgctcgcgtctaccgaacgtacgttctgaagagacgtgccgcggagacaaccccgctgcgcaggtgtcaggcagtagactcagcgagagtcgagcactgagcatccagcagccctccaggcgagtgaacacctgcggctgtgacagtgaaaaacca

SEQ ID NO: 461762 - DNA, 142 bp, Sorghum bicolor
  unsure (1)..(142): unsure at all n locations
attcccggtcgaccacgcgtccgcgcccgcagacgcccggngggccgccatggccgcgtcggatctggagagcaaggccaaggaggccttcgtcgacgacgacttcgagctggccggcgagctctacacccaggccatcgac

SEQ ID NO: 461763 - DNA, 225 bp, Sorghum bicolor
cgtccgaacatgttattacacttcctctcaaattagcccactctgagacatgatggacatgtatttcctgctgtggtaattcctgctccaagatgtttggggaaacatgtgcacacatctatgcttctatgacagcaaaataaaacagttcctgcccgacacataatagtggattaatctctctgtcaaatgactagatatatcatagcctagtgccagattttg

SEQ ID NO: 461764 - DNA, 82 bp, Sorghum bicolor
cgtccgaatgaacatcatataatctacaaatttactattatgtattaatgaatcttggcagggaaaatgccactatataaaa

SEQ ID NO: 461765 - DNA, 280 bp, Sorghum bicolor
cgtccgcaggctccgtggcgcacgcgtgcacgcaatgacgatgcccttgctgctcacgccgggcgctcgggcggcgccctcgccgtcaacgcggtggcggctactcctttcgctgcacctacaaattactaatgggcggcacaaccaccggcacggggacgtgttcgctttcccccttctgtaccctcgccttcgcaaccgccgcgggcgaatattcgcgtgctcctcctcctcgtgccaaatagaggagcctgccgacgccccccgtggttcttttgac

SEQ ID NO: 461766 - DNA, 205 bp, Sorghum bicolor
cgtgcgctcacgcgtacgatattgcctaccaaactactttcatatattgaactcctgagtgaactaacatgacaacatacgttgcagatatgggaaagcatcattgcttgtaacccaacatgcaacacaatacaatgccttgtgagaaaacctgggtccattgctaggactcggagagataaacagcattatagtgtccaatgga

SEQ ID NO: 461767 - DNA, 185 bp, Sorghum bicolor
cgggctcgcgcagtgcaccgttcccatggccgattcagccgcgctctccacctccctcccccgctcgctggcgtccaggaggcccctctcgtcccctctccacccgggccagagccgtcccagctcgattcggctcgctcacggtgcgtgctcgcggaagcatcgagccttcgcctcctgccgct

SEQ ID NO: 461768 - DNA, 336 bp, Sorghum bicolor
cgtccggcgatgccaacgtgagctctccgaggagtaaggtggccaacgaggacgtggaagaggtgaacaatgtctgggaccggaccaagaagagaaagagcacagactttgacatagccaagagcatcgagctgctggctagctcgttcttgaaagattgagcacgccaggttggagatgtacgggagacaaaaggatggggtgagctgaattaaaaggggatggactagaacaaatatgcaccatcatgtgtttgaaaatacactgaatgggttagaataggactacaagaatgtggaaaccgtaagtctttagttatatttgtcgtgaaaattc

SEQ ID NO: 461769 - DNA, 134 bp, Sorghum bicolor
cgcgatcgtgccacctcgccctcgccctcgccctcgaggcgttagatcagtctcctgtgacgaagttttggacaattatatgcggttacacgggctggaaccctggtccactatgctgagacatcccttgcagt

SEQ ID NO: 461770 - DNA, 323 bp, Sorghum bicolor
  unsure (1)..(323): unsure at all n locations
tcccggtcgaccacgcgtccgattgctataccaatgggcgtctcaacatgggaacttggcagggtatctggctctgtgaacatcgagaccatgctactcctcgacagattgggatcacgctcaatgggatctaatctaaagtgatctatgttatagttggaaatgcanatgctgcaatttcaacatgtttaaatcatatgcaccgaaatagaaactttgtcccaattgtgatatgagcttcaatggagaatgttacttgccatatgatgctagcctgaccggaacaggattttttcacgggctttttttcatgttgagcttgt

SEQ ID NO: 461771 - DNA, 278 bp, Sorghum bicolor
cgtccggaccaccgcagtggcgttcgtgacagcggcagcagcagccgtcagggacgacgacgggggcggtggcgggccttctgctccgtcgtcgtctccggcgacgccgccgtggccggagcagttccacgcggtggtgatcacgaacctgagcgcgcacggcggcggcggcgggctgcagctgatcgacctctactacgactggccgcgcgggcgcgatctgaacatcgttcgcgaccaggtctccggcgagccgcaatggaacgtggagtggacca

SEQ ID NO: 461772 - DNA, 248 bp, Sorghum bicolor
  unsure (1)..(248): unsure at all n locations
acgcgtccggagtaatacgtaactacctacagtggatggatgaaggtacctgagtgcgggaggagctgctctcgtggggctggctgcctggatgcagaggtgccgactagcacgtcgtcggcaatggcagcactccaactggagatgagtgctgatgtagttgattggcccggccgtgtggtgatgtgtgctcatggcgatgtnctggccgcgtggtgatggtgctggagatcggcccgatcaggtga

SEQ ID NO: 461773 - DNA, 236 bp, Sorghum bicolor
  unsure (1)..(236): unsure at all n locations
cgtccggctgatctgctggactacgacgccatggcagctgcggtcgtcgggtgccagggagttctccatgtggccactccagtgccttcagagaacctgactgacccagagctacaaatgttgggtcctgctgtcactggtacaactaatgtgctcaaggctgcctctgncgcgaatgtccagcgagtggtggttgtgtcatccatggttgccgttgagatcagccccaaagattg

SEQ ID NO: 461774 - DNA, 448 bp, Sorghum bicolor
  unsure (1)..(448): unsure at all n locations
tcgacccacgcgtccggcgccaccgaggaggaggtcctcccggcggagcagcagcagcatgggttagaattcctccgcctgccgtcccaccggcaccaccggcgccgggcctgcagcctncaccaccacctctggtggaagcgccaccacggcgtctaccgtgacgcgccgctcaggttccccatggcagaggaggtcagggaggcggaggaggtgaagcccgtggccgagccggacccggatcgttctctcccagacagcgacggagaccgcgagctggcggccagcatggagccgtcgttcgccgacgccgaccggcacgaggaggacggcgagcacgcaccggcggtcagggcgtggaagaggagatgctccgaggtggtccacttcacttcacacggatgcgcgcacggctcaccacacacacgacaggagaggcccgcagctg

SEQ ID NO: 461775 - DNA, 72 bp, Sorghum bicolor
cgtccgctcactgcaccacctacccggccgctcaggcacgtgggcctctactgacgtgcccaccactaggct

SEQ ID NO: 461776 - DNA, 85 bp, Sorghum bicolor
cgtccgtttatagggacaacaaagagaggaattggaccatgctattcaaaacaaggttacaaggaatggtctcagaattaggggc

SEQ ID NO: 461777 - DNA, 77 bp, Sorghum bicolor
cgtccgaagaaacttacctgagccacctctgctcaagcccacgactacctgtctgacaagctccccaacactactgc

SEQ ID NO: 461778 - DNA, 420 bp, Sorghum bicolor
cgtccgcggagaggcggagccgagcaaggcgaggaggcgactcgatggagttggcgtcgggggacgatgagctgaaatcgctgctccagaacttccatcgcgtctaccaggggtacaaagatgcacttatggaggtccaggctttaagagtaaattgcaacactgagttcaaaaggcgtgaagctcttgaatcacatattacagatcttaagaaagataatgagcgattaagaagactatacacagaaactttattcaagttcaccaaccaggtgaaattccacgcagaagctcaaagcctgaaagaagagctggaaaaggcaaatagtagattgatatccatggaagaggagcacaagagggaagctgagcaacttaagcacagcagtgaaatgaatagcaatgacctggagaacaaac

SEQ ID NO: 461779 - DNA, 113 bp, Sorghum bicolor
cgtccgtggacaggcagttccgaactcggcaggggaccatgtcgacagcgcactcgtacacggacgaccagaggctgttggacgcgtaccaccgtgacctcctgtgggaccgt

SEQ ID NO: 461780 - DNA, 441 bp, Sorghum bicolor
cgtccggcacttattacattgttctcttgaaaatatttcaaactttatttggtctccttcagtctactgaagtgtaacagcctgtagttaatggaagctcatttcttgcactgagatgaatttcccatttttatcataaccttggttatttatctgccacactaacattgatatcagcatgcttttatttatgcatttagaggatataatgcggactacacttgctgggcttatttcatcgcctttgctgtaacttaggggcacattatggaaggtgatcctgaacttattgacgattctgagttttatcaacaacttcttaaggagtttcttgagtcatgtgatagaagggccttagagtcggcactttatgccctaaaaaagcagcaagttaaaaagagaaagcttgttgatcgtcgtgcttcaaagagcacaaagata

SEQ ID NO: 461781 - DNA, 173 bp, Sorghum bicolor
cgtccgcggactcgtggactgacgcgtggacggactcgtggactgactcgtgtgcgcgtgggaaccaagcagaccccagtcaaggagcgggtcttacgataagtgagaagagccccacatgatgtcttgccatacgtacgtatacgaccacctgatgtgcgagatcgattgcc

SEQ ID NO: 461782 - DNA, 321 bp, Sorghum bicolor
cgtccggtcaacattttggtaataggagggtttagcttatcactagcagtcaaatcttctccattgctgcaagacgtccgaactgcctcaagatgttagcgtggtgattagatcccagaaccaagctcagttctatgctgatactcttttcacatgggtcttccaccatagcggtgggtgaacaagtcatcaatcaccgggtttctttgagcccccattcgttcatctcctgtaaatggcatcatccaccgatccaggtatttaaatcttgccgactgtggacttgttgcgccgtgccgtgatacactaatactgtgggaa

SEQ ID NO: 461783 - DNA, 168 bp, Sorghum bicolor
cgtccgggtgacctggacccggcgacggcgaaggcggtggcgggcgtagcggggccagtgctgtcggcgttcggctatctcattatcctgcggatcgtgatgtcctggtacccgaggctccccgtcacggagttcccctacatggtggcgtacgcgcccacggagccg

SEQ ID NO: 461784 - DNA, 395 bp, Sorghum bicolor
cgtccggttatcaaaatcagagagtgtgacatctacagctataacccagactctgatgcagatccagttctagagaaaggggccatatggtgggtcaactacttcttctacaataggaagctaaaacgagttgtgagctttcgatgttactgcactagcaaattatcaggagatgacttcttaactggtgttgcatctgatggtgaagaggaagatgccttgattgacatggacatatgactgacggagttctgcgagctacctgatgtgcgtgtaatatagagcacgtatgcacattcctgttaggaaacttttaatatgacttccttctatcgtagcctgtaaaaaccatggcccctgtttacctttgtttgtatatgcggatttgagatttg

SEQ ID NO: 461785 - DNA, 270 bp, Sorghum bicolor
cgtccggcatgatagaggcgacccatttgcgaggttcgattcaatgaagagcagtgactacgacagccggcgctactcattcgatgatgaggagccctgcggaaccgggccgtgtaaatcaacagaaaccaagaacaggagcccgtcgaaacatgggacagacacatggagcgcgttttgacagggattgtatcatattcatagaggtcatgtgcttgtgcaccttactgcagatatatacacacgtacaggggcgagacgaattttttt

SEQ ID NO: 461786 - DNA, 375 bp, Sorghum bicolor
cgtccggtcatccatgaagttacatttacaccagcaattttagtgtactcagtcgatgcctatggatcagaaatgtgtgttcccaatattgcatatataggtgtgaaaaaaacaacacaaaatggtatcagcatgtggccattatggtatgaaaccattacagaagacatgcatggctacccttgtgaaccatactatttacacaacaccggcaacttcgaaggagactctgaccttgacagtgagcatcgtagagaggtccacaaacaatactatgatcttcaagatggaaacaatgagatgacctcccgattaaaaaaatatgtagccggattttcagacgattcagattgggaaccatatgcaccatgatca

SEQ ID NO: 461787 - DNA, 175 bp, Sorghum bicolor
cgtccgcagacgcgtgggttttttctttttttaagaggaagatcaacttgatgcagcactatgcacacgcaaatacactacttgaccaaatgaaagagggtccgagcatgatatacatgcatcaacgcacagacaaacacacacacactacagaatacaagctcaagagacacgg

SEQ ID NO: 461788 - DNA, 84 bp, Sorghum bicolor
cgtccgcccgggacgacgcgccgcccgcggaccagccgtcgctgccgagacccgcgtcgcggaggaggcccgagaggtgggggg

SEQ ID NO: 461789 - DNA, 76 bp, Sorghum bicolor
  unsure (1)..(76): unsure at all n locations
cccacgcgtccgaaaaaaaaaaaaaaaaaaaaattaaatattatatatttttntcttattttatactttattattt

SEQ ID NO: 461790 - DNA, 245 bp, Sorghum bicolor
cgtccgaaaaaaaaaaaaaaataaaaaattataataaaagattaaaaataataaaatttaggtcattttaaaaaaatcttatataaattacaaaggggggtggggtaatatactattaaataagatcacataaatttaatttgggttgcccctaatttaaatccacatttacttacctaaaccctttccaatacttaaattttttttttttgcacccaatttaattttccttcgctgcttttata

SEQ ID NO: 461791 - DNA, 223 bp, Sorghum bicolor
cgtccggtgaaccgaccgacagacagacatggccgcctgcgccgtctccagcctgcccgacgcattctccatggccagacacccggatgtctggaccagctacacgaggagcagccgagtgacggcgacgaaccctcagatggcgcgcaacccgcagaggaacggcaggatcaacagcaagacggtaacacatgactgacagcggaggtacctgagcatcatc

SEQ ID NO: 461792 - DNA, 283 bp, Sorghum bicolor
cacacatgacacatctgaatgtgtatctaatatacctaaatcatagaaaacactgggccttgttgtgtacactttctgaggatgccaattcttatgacaggtacataaccgttcattagctatgcacctatcgactcaattttacacaagatgtaaccacaacgtcgacaccatccacattatacaaccatcattcatactatacatgatcgatatatatagctaatccaattgtcttagttcccattctctttccacaattatgacctggccgggctctttt

SEQ ID NO: 461793 - DNA, 390 bp, Sorghum bicolor
cgtccgatcagctgccagctctccgtccccgcgcctggtgccgccaacgcatcgccgttccagcccacgaattgcaaagtctggttctgattttgggatgtgggatttggatttggatgccacctggtggtgtggatttcctacagatgctaggattactactagtagataatattgccatctgatgctgctgctgctgctgctgctgctttctgtggatttattctttctttcgttgattctctcagtcgatttccatgtcgattgttcctctgtacatcgacgcggctgcttgatttatatatagattttcttttctcaacaaaatcctgagattcaaactgctagatgtgtaccagaggtaccatgtctaactactgatcactacgg

SEQ ID NO: 461794 - DNA, 113 bp, Sorghum bicolor
tggattcatggaataggataaaatgtattgaatctgacctggagcgaacaaagaaagtagctgaagcacacggtgatgaaacaattggaaatttccgagtctctagaggaagt

SEQ ID NO: 461795 - DNA, 196 bp, Sorghum bicolor
accgtccgatatcccgttcgacccacgcgtccgcggacacataggtccttcggttcgtgcagaattcgatcagttatagatagaggtaacttacatgctaagtcaaaaatctgcggcgagcggatgcatcaatccgatccgatcctacttatgcccacaccaatgaggccgagccaggttccaagatatgaaagga

SEQ ID NO: 461796 - DNA, 287 bp, Sorghum bicolor
  unsure (1)..(287): unsure at all n locations
cgtgcgggtgtctgagctcgacgaccatctcgcgcctgccagagctgcatctgctgctgaaagttgatgtacatagagaagatgggatcaggtggtttaccctttttagtttgcctctaatagtgacaggtagataacgggtgtctagttttgcaactattgattttattttacacaagatgtaaccgcaacggcgacaccgccgccattgttgaaccgtcattcatactcttcatgatagatatatagagttaatngnaaaaaaaaaaaaaaaaaaaaaaataaaa

SEQ ID NO: 461797 - DNA, 366 bp, Sorghum bicolor
cgtccggtttgttggaatgacagatatagccacaaaagaagcttttgattgggtatctaatatacctaaattggtgaagacactttgcattatgttgagactttctgatgatgtgaaatcatatgaggtttcctttttcgtgcatgagcaaggtacaaaactacccaaattgaagggggaggggttaatctgggtgatagcatccatattaaacaccaaacatggttgcgatacaggcaccacttccacccccatgccatttgcctcagttcccatcctctctcccaatcggtgacctggcaggggacatagaagcagaacctattccctctgtaaatttaggctttatagattcttgttcatgta

SEQ ID NO: 461798 - DNA, 180 bp, Sorghum bicolor
  unsure (1)..(180): unsure at all n locations
cgcgtgcgcccacgcgtccgctataggccggacgtaccacgtgcacctcgttcgcctctacggattctgcttcgacgcgaacacgaaggcatgagtctactagtacttggagaatggctcgctcgagaagtatctntacggcgatgtggacggcagcacatccacgaggctagagtggga

SEQ ID NO: 461799 - DNA, 317 bp, Sorghum bicolor
cgtccggtgagctacatgatccctccatctgacaacaatgcagaaaccatggtcagacctaatcgtacttcaggagctgaggaggtgactggccgccttgcagacatagatgcctatagtgatgtgctctatgatgagctttctttcaactcaagaagacatagtagcaggagccagccaccaacagctcgagctctggaagctattgcctgtggctttcttgcgactaaacacaagggcagggaggcaagtatcccatcttcaagcaagagcagcagacctgttcgtctgccacgacgatcacctgatgttgcact

SEQ ID NO: 461800 - DNA, 310 bp, Sorghum bicolor
cgtccgcggacgcgtgggcggacgcgtgggcgccaggagggctttaccggacgcctctgggccgcctgatattcaaaactgatgagatgattcaggtggtggaagcacctgacatagtgaggaacaaggtgtcattctccatctttggcctagagggtgcagtatcattgaaagggtagctgaatgtgttggaccagtaatggattcaagtcatatttgaagccccggaattggaaggaggcttcttggggttccaattccgtggcgagagggaagtcaagcttgagatcacctacctcgaccagaagat

SEQ ID NO: 461801 - DNA, 361 bp, Sorghum bicolor
cgtccggtgctgcaagtcctgtaggcaccaccgcaccaatgcctcagcgttcccctctgcagtccaggcgtccagctccgttcccattcgtccttgtgcaaatgtttcctctatggtgatcatgatcctgtgtcatcgcctcattgggagggtatgcgttatgtgtgattgagtcgatcagttggacctgttgccatgttggtgactcgtttgttatctcagcatttggttctttggagtacataaacgttaataaaatcattagccgtggcttgatgtagatcgagatgttggccatatttatcccgtgtaaatccatgcatattttatgttggtttgaggaatgatgtttatatcaaaa

SEQ ID NO: 461802 - DNA, 370 bp, Sorghum bicolor
cgtccgagccccgttgctctcttcctctgctccgcagcatccttgagcatcgtctaagccagctaacactctcttccctcgtcggactcggccatgagccggtttcccgtcacagagctccgccatggccgccatgggagcctgcgcacatggccaggaggccacagaccttctccggccaagccgctgacaccagcgcgagcgcgcgagcctcaggatgctccccaacgctttccctcgctgccaacaagcgtccaccggccggaaatcaggttttctccgacatcctctgctctggaatcgcgaccagggacttcgcgcgacaatttgaagttctccaggggtctaattgcacagactgtgactcagt

SEQ ID NO: 461803 - DNA, 163 bp, Sorghum bicolor
cgtgcgaaactgttgttgttttctacattctctcttataaataatgcaacgaaaaccatccttgattaaatatctctgccgttttttgttggtgagcttgtgcacctcctgaaagcaagctaacccaactcgtgcgttgcttcttctgattttgacgaactga

SEQ ID NO: 461804 - DNA, 385 bp, Sorghum bicolor
cgtgcgcccacgcgtgcgcggcatgcagattgatggaaatgaagatagtgctgataaatcagttgaagaatatcctacaaaacgcagacggggattttcttgcatggatgctaccacttcattaatggagcagttagcgctcctgaccacaacagctagcccagatgttgttgctgcagctgctgatgctgcaattaaagcgttcagcaatgaaaacccacaagcaaagaaagcctttcgcctcagcgagcgagaatataagactaaggccttcggttctaatcatgtccaacagatcgaccgcaaaatcggcgataaggatgtgaaaatgcatggccagcctggttctgataagcaggaaaaagaagttcattgctaatgcata

SEQ ID NO: 461805 - DNA, 153 bp, Sorghum bicolor
cgtccgctccctctcctctgccaccatcaccgccccttccgccttcgccgcgccggccgcccgcgccgtggccaggaggtcgtccttcaccgtgcgcgcctctctcggcaaggccgccggcacggccgccgtggccgtggccgccagcgccct

SEQ ID NO: 461806 - DNA, 87 bp, Sorghum bicolor
cgtccgcgccctatgttattactattattcctgctgctaaatggctgacatctaccgagctcgagggaggagaaaaacatggacatt

SEQ ID NO: 461807 - DNA, 268 bp, Sorghum bicolor
  unsure (1)..(268): unsure at all n locations
cgtccggcatgatggagctgcaggaggctttgctcgagagtaatcaggctacaaagggtgccaatgaaattccttctgccgcaaatggagacaatgacgagtggtcagaagtacagagattgcagacaaggataacaacatttcagaatactgagatagatanatggcagaggaaaatacaggtgacaacaggtgctgctgcacttaaaggaaagctacatgcatttaatcagaacattagtgaccaagttgctggttacatgagaga

SEQ ID NO: 461808 - DNA, 136 bp, Sorghum bicolor
cgtgccgactagttctcgtacgcgtgggcggacgcgtggggtgcaaaaggccgaggatgttattggccctgaagttgaaaagctggtcgacggccttcccgttgatggggtttaactcctggaaaacctattattt

SEQ ID NO: 461809 - DNA, 303 bp, Sorghum bicolor
cgtccgaccgacgcggccaaacggagataagagcaagataatgtcgtcgacggcgtttagccacctgttcccctccgccggcgtcgccgcggtatccctcctccctcgctgcgtctccttcggcgccagcggtggagctgcccctggatggaggagaagaagccgcagcatggccgcggccaccgcggaggcggcggcgcccgcctacacctccgactccttcgtcctctacttcaaggcggagggcaccatggaggagagggccattcccaagatcaccgagtctctcagggtatggaagga

SEQ ID NO: 461810 - DNA, 241 bp, Sorghum bicolor
  unsure (1)..(241): unsure at all n locations
attccnggtcgacccacgcgtgcgttttgaactggtggtgttcagaagtatcgcttgcacacgaggcggccgaactcgacgacggcggtcgcggtccagagcgggggcgccagcgtcggcgcgccgccgacggcgccacagttcgtcgtggtgggaggcatctgggtgccaccgccggagtacgctgccgcggctgcggcagctgctgctgcggcggcggcggcggtggcatcttagactt

SEQ ID NO: 461811 - DNA, 211 bp, Sorghum bicolor
cgtccggtgaaaatgtcaccaccattattcctgctgctaaatggctgacatctaccgagctcgagggtggtgtagaaacatgcgttcttggtgccctgtgccttataggacactgtttcttggtgggtgcttatctagtcatgcaggtaatggaaagtttggagagcttatatatctatgcttgattatcgatcctttgtggttgtagact

SEQ ID NO: 461812 - DNA, 213 bp, Sorghum bicolor
cgtccgggcggtgcaggcccgccactacagcccccgaccccacgctcatccggatccagccttacgtccacgaagcacacttaccggatcctagggggatgtccttccatacgtctaatacaccgatcgcgcttataaggactaaacacggctgataccgtatgacaagaacagtactactactggtgctactagcgagtaccgtctactact

SEQ ID NO: 461813 - DNA, 106 bp, Sorghum bicolor
  unsure (1)..(106): unsure at all n locations
cggtccgtnatcccggttgatttattcggggggggattaaaaaaaatttataatttttaaaaggttttaaaattttagagggatttataaataaattatatagggg

SEQ ID NO: 461814 - DNA, 305 bp, Sorghum bicolor
cgtccgaggaggtgatcctgcgcaggagatcgaggtcaatgaacagcgccggcgcgcagaggagccacgtccccgatcaggccgcgagctcgtcgaccgtgtgcatgcgacggcgacagtggcggggccggggcagacgccgccggcagcaagagtgccgctgcacgtgccctgttcgcctccccgaggctgctgcactcatcctccctgcccgccggcaccctcgccttcgccaagagccccgcgcgggacgccgagtccgacacggccttcctcatgagcccgacgtccgtgctcgacgcggc

SEQ ID NO: 461815 - DNA, 240 bp, Sorghum bicolor
  unsure (1)..(240): unsure at all n locations
cgtccgcttcgtggaggacgagcgcgcgttcaactcgtgcgtggacgcgcggttcgcggcgctggacgcggaccgcgacggccgcctctggggcgccgagatgaccggngagctcatggcgctgcgcgtgcgggaggcgcacttcggcgccgacgcgccggcgcccgacgccgagctcgccggcctgtacggtgcgctcttcgcgcgctttgaccgcgacggtgacggcgccgtggacag

SEQ ID NO: 461816 - DNA, 330 bp, Sorghum bicolor
  unsure (1)..(330): unsure at all n locations
cgtccgattacagagcacatcccgttgccaatgatgcatttattcggcatagattcatatagttgggtggttgcaatgggaccctttgtttaggtttggtgcagatctatcctctntgttttcttccttatatgttttggtagcttaacctgcactgcgcctgctggtcagtacaatntggtggttagtatattgtgccctttgtactatgtntacctcagtattgtttttttgtgctatacgttctaatcaagataacactgcatangatttcaccataaaacaatactggctcactgacattatttctagtttatctgtgagtcattc

SEQ ID NO: 461817 - DNA, 356 bp, Sorghum bicolor
  unsure (1)..(356): unsure at all n locations
nggcgggaagacgaaaacaccaacgccgccgcctgccggagtggaaagggggaaaacccgcagccatcgcaatcccacccatccgatttcaattcgtcagtggtgcccgcagcggaggggatggcgagctcattctccttcccgctgtttacgccggcggatatcgtggcggcgctgcacagctacggcatcgcgcccagccctagcttctgcgccgaggacgtcgtccaccctcagcccggccttctcgccgaggtcctncagctcttcctnctcaacttcgtcggcgacgagcccgacgagcagctacagttcaatgcccctgcaggtgctcgacaacccggagcaccacatgc

SEQ ID NO: 461818 - DNA, 122 bp, Sorghum bicolor
cgtgcgagaaaaaaaaaaaaaaaataaaaaaaaaaactggccttcaaatataaacaaaacaatataatataacacatcaaaaaaaaaaaaataaaggggataaagggggccgcccgttttaa

SEQ ID NO: 461819 - DNA, 87 bp, Sorghum bicolor
cgtgcggaaacttctagatacttcaattttgggtacaacttatgaatactaaggaatgacactttggagagggggtattggttgtga

SEQ ID NO: 461820 - DNA, 282 bp, Sorghum bicolor
cgtgcgcccacgcgtccgcagccctcacagcgacgaaggccactgatcttttgtagtttgtccaacctccaaagcaaggccagcggccactgcccactagaaccaacggcatgtcgtcgtcgtgctccactgccatcgacggcggcgccgcgaacccgccggcggccctggacctggcaccggacacggacgccccggcgggcgatggcctggaactggcgcagttcgcggcgggttgcttctggagcgtggagctgacgtaccagcacctcctcggcgtgg

SEQ ID NO: 461821 - DNA, 434 bp, Sorghum bicolor
  unsure (1)..(434): unsure at all n locations
cgtccgcgtacctacaccttctggacgggttcgccggctccgggaggccgttccgccccgacgcgagccgcagcgtggcgcggctgctggcataccagcgggcaagcgtgaagcgggcgtacgtggagcgcgcgcggatgctcgggttcgagccggcgtcgcccaggacggccaccgccaacggcgccgccgccgacggccagtacggctacctggccagccccacttgactctgtactacgtagctacagtagaaagcaagaaaacaagcatgcatgcatgcatgcaaactccattcttaacagaggatatgcacgtgtttcttgacgtgcaataaattaccgtgtgcatatatgtgactataccatgcatgcatatgtggctataccatatgcatgcatnctgacaataaattgccactgtccacttacttt

SEQ ID NO: 461822 - DNA, 290 bp, Sorghum bicolor
cgtgcgcatccatcgattttctgcagacgggctcggcggtgtcgacggggctggcgctgtctctggaggaccggcgccacggcggcggcggggctgggaactcctccggcgattcaccgctgctcctgctgcccatgctggacgatgacatctcacgcgaggtccagcggcttgacgctgatatggaccgcttcattaaagctcagagtgaacggctgaagcaatctatactggagaaagttcaggcaaagcagtttgaggcactggccttaagtgaagacaagatactc

SEQ ID NO: 461823 - DNA, 127 bp, Sorghum bicolor
cgtgcggctggaggacctggcaaatgtggtttccaatgcttgcatttggctgcaggacaacaatgtgccttacaactgcgattttggtgggaaagaggtttctgttccatgttatcaagaacagctt

SEQ ID NO: 461824 - DNA, 219 bp, Sorghum bicolor
gtccgatcccgtcgccacgcgtcgccacgcgtcgccagctcgctgctaccaggctcggcgctcagcgaggcgcgcgcaagctacgctgacgcatcctgaccgttcaggtggcttcagccgggagcttgatcgcgaccggccggctccgcagaactctggggagatcacgactacactctctcgcacgctcaatgtgggggtcagtccgtcacatgctct

SEQ ID NO: 461825 - DNA, 369 bp, Sorghum bicolor
  unsure (1)..(369): unsure at all n locations
cgtccgtattgctggaatatgcaggggtaaagattagaatagtgatgatggatcttggcaacaaggctgatgacccatcattcttaccatatccattatgtgtgtgcagttgcatctttagatttgccctcatttattttttctcccaactcccttctgaaacatttattctaaattgctccttattcagttaactggtggaggtgtccataatgaaggcgtattgtggaggtcactgcctttgacgttgaaggcttagtgctgtactgctgtgggagatacgtggggtgtnggctgttggctaatgtctccgacgtcgactggcaagtggcaaagtgatcttaaggtcgacggtgactggcaaatatg

SEQ ID NO: 461826 - DNA, 337 bp, Sorghum bicolor
cgtgcggacaggtttaatagatcagtggtacgtgtccaagctttgtttcgttctcatcgttcacagcaggagtaccggaggatgaaggttgcgtcatgaggaggccaaggtggaattcagtcaaaattagttaagacgggcataggttcaggatctgaagtgacttgtaccttgtaggggttggccagttcttctaattcttgtatatttgaaggaataggcgtagcttgctgatggtgtacattttaggaacatctgacgctcgtggccagtctgccaaatgtacctgccgttagccttcttctatggtgtgtatttggttggttttagttgggcg

SEQ ID NO: 461827 - DNA, 331 bp, Sorghum bicolor
cgtgcgcaagtatgcttgggtcttggtgactaggcctattgaatttggcggcctcggaattctggatctggaaaaattcaggagggcactaggcttacggtggctgtggttttcatggaccaaccctgaacgtccatggaatggcacgaaactaccgatcgatgtagtggatgcaactctttttgcagctgcgacaagagtcacggtctgcaatgggagaaaggcttccttctggctctccagttgggtagatgggcaggctccggctatcatgtgccccctgctttacaaacatagcaagcgaaaaaaacgatcaattagagaaggattg

SEQ ID NO: 461828 - DNA, 291 bp, Sorghum bicolor
cgtccgcaattttggtgtggcgcgcttcaaaggatggatccggtggcataggtaactacgtggtggtggaaaactattttgttccttcgctggtctaaaagagagctatattctttgaacggaacagcaaaaaaggtacttttagtaaactagatgttgatcgggtatcatttgaatttgtgaaacttaaagggatgctcttacaatcatcacaggaaacaatatgaaaacatttttaaaaaaaatctttaggtaagggttagcgtgaccattctaggctttcacatggta

SEQ ID NO: 461829 - DNA, 225 bp, Sorghum bicolor
  unsure (1)..(225): unsure at all n locations
cgtccgttcatttgtttactgttttgtcatgcagatatggttcgtggattgatgtgcaatctgatggcttctgaagttcgtgatattttacgtctggagtgctacgtgaccaaggatatagagttcatgttcgtttgcttctggatgatgctgcgtaacctgttgcaaatgtgtcttatggatgatgccacanatgatccactctcattttgtgttgtatttaat

SEQ ID NO: 461830 - DNA, 84 bp, Sorghum bicolor
cgtccggaaggtttgaagcactggaagaaaacaggatgctgataaaataactcatcagcaaggagttgactgtatgggttgatc

SEQ ID NO: 461831 - DNA, 371 bp, Sorghum bicolor
cgtgcgcccacgcgtccggcataaagcaaccgtggctgaatttctctccaacaattatgattgggtcagtatttttaccttgggaacattaggcaaacttatttcatttatgaaaattttgtatccttcctctcgctgtatatgttcgaaccatacatgaccttactcaagttgtagtgcaacattaaattctgtggttaaatgtgtcaatatctacctggttaggtctaacctgattgaattggttacatggtcaaattgttggcaagctgaattcactgcatggactctttagaggcttaaaccggagtggtgaactactagaagttttgtatcgatgaatgatgaatcttaattatgaactataaaaa

SEQ ID NO: 461832 - DNA, 325 bp, Sorghum bicolor
  unsure (1)..(325): unsure at all n locations
cgtccgaggacattgacgacccttacagtatagctaaggtgcacagacgataagacactctcaagactacagacgctcacagacactacatgcgggctacgaaacaactcaatggagtctgacccaccctgcaaattcgaccataccatgaagaactgattgctacaaccctctcacaccatacaaggatcctactaccgagtgctggtctcttgtatacctagtggataacacaactcctgaccttcctatattgcaggatatttaaaaactaactaccgctccaacatgatccatatntgacgtatttttgggtctgatggaa

SEQ ID NO: 461833 - DNA, 221 bp, Sorghum bicolor
cgtccggtacatgaacaaaagatcaagataatatggctagatcgaaatcgcaccttatagattgatactatgaaaaccgagtcaaactgtgtggacctgttgaaggattgcgagcattggctgcatgctcctcacactgcagggctaccttgagctattacataatgccttgacaagagatgcatgatcgacgctttggatcgggtgtcactaaacaaata

SEQ ID NO: 461834 - DNA, 379 bp, Sorghum bicolor
cgtccgcccacgcgtccgattatgttactcggcagaagggtactgagagagcattcactggggaatactggaatactaaaaccccaggcatggatcactgtgtctgctgcgacacccctctgtttgagtcatcaaccaaatttgatagtggtactggatggccatcctactataaaccaattggcgaaaatgtcaagagcaagcttgatatgtcaatcattttcatgccccggaccgaggtgctctgcgccgcctgtgatgctcatctggggcatgtctttgatgacgggccaccaccaacagggcagagatactgtatcaacagtgcatctctgaaattgaagcctcagtcgctggatcctttaggaaggaagtaagt

SEQ ID NO: 461835 - DNA, 495 bp, Sorghum bicolor
acgcgttcgaccaaacctatggtggagccttggctgaagggctgatgtatctctcgagaacaagaataccgtgaggagtccaaacagaatactgcgatacaaacagttctttaatgcttgagtgtgaacatagcccaggaagctgtcaggagactaactggaacaaccctcatgttatccaccgcatttgacaagcccatgagcagcacacccttgtcatcatgtgcatatgatgcggcttctgcctctgtcgccattgaagatagcgcgaaacatttcctccatgcgccactgtaaagcggtcagatgaagcttgacatcctgaacgcggcgattcctctgaccagtgaggggataggcaccaagccagcttctctgcagcgtgttgctagcttggagaacctgcagaagaggatcattggagattcgatgcactctgagactgcatcaacattctcagagcctgaagctcttgccgataggtaaacatgagct

SEQ ID NO: 461836 - DNA, 275 bp, Sorghum bicolor
cgtgcgcaagagtgtacaaggaagaagaagcaccatcagcttctcttgatgctaccttgatccatcagcagcagcttcttcgtctgcttttgggggagattattaagagtaggagtaggattactagttattattactagtgagtgagtgaatgagtgatcgaacgaggatgctggccgtgtccatccgctgactaacatctgaacttgtccggccgcgaccagcaaagcacgctggtgtctgaggaaattgctgaatataatgggaggtctttt

SEQ ID NO: 461837 - DNA, 302 bp, Sorghum bicolor
aacaggaaaaaaaaggtttacaaatcatacatgtggtggatacaacactaaaacaggcgttccacgcagctagcacggcactgatcactctgtctgatcccgtggagtgaagcggtgaacgatccattaatccagcgaagaactgaactgcacaggcggcggcgtcgacgaacaactgaactgtaccggcggcgacgagcaaagcaggcgggggcagaggaaattgctgaagaagaggggaggccggtggccgttgtggttgtggggggagtgtgttcagaagaaggagcgcttggtggatt

SEQ ID NO: 461838 - DNA, 347 bp, Sorghum bicolor
cgtgcggcaattattttagtgtcctcttttgttggttttatcaaacttagctctgtacctgaagaaaactcatgccttaatttcttatatttggattttagtccgatcaggttgccttcttggtatttgattgctatgtgcatgtcttagctttctaacctgatgttccgtgccaacttttgtgtttaagatattatcagcttggcatccagacattatcatgctagcagtaatctgttgctagttctgcatgcttgtttcttgtagcaatgtttcccttgtgaagaataatttatgttacagctccctgcaattaacttctgtcactggttgtaggcgtctaatga

SEQ ID NO: 461839 - DNA, 120 bp, Sorghum bicolor
cgtgcggtacatccgttccagcctacatccatggcggctcatcccctcctatcctacacagcgctggtttgttgccgtcgggcacctgcacgcgctgtatgggaaaggagccaccttccc

SEQ ID NO: 461840 - DNA, 272 bp, Sorghum bicolor
  unsure (1)..(272): unsure at all n locations
aattccccggcgacccacgcatacgaccaaagctataatttaattattctaatttgtaccatctcttattctgtctcatccacatncaccaaaanaacgaagatttttatttacatttaatttntatccctcaanacatacannctttatanaactccatcaattatataatatctcatttcctcttctctattaatcacattttaatattccaaactaaactctctatatcattatttatataatcattatatcatcttacacaaatatta

SEQ ID NO: 461841 - DNA, 280 bp, Sorghum bicolor
  unsure (1)..(280): unsure at all n locations
cgtccgttctggtacgggcaaccggcgtgttcttctgttggctctcaggatgaaacctgaatcttctaatggtgttacagttacagcagtgaattangcttggaatttgattgacagatcaaagaagttaattacaagtgtaaatacagtatacaaagttgtttgggtaggagtaggacaggcttttattgttcagttgctcttgtctcggtcaacctgtaaacagatcatgcgaaagatgtacaatgaacaatctatggagtgttagagttacacacaa

SEQ ID NO: 461842 - DNA, 526 bp, Sorghum bicolor
cgtcctatataaaattaatataataaataatttaacattatatcataaattattaactacacatcttaatttcacaaataaagagtgattattctgagacttttctaacttaatcaccttataatattctctctttttcttttctttttaaaaacaaatataatgcccccccttctttaaaaaaccaaatttattctccacttttttaaaaatattacttttatatttctcacctatataatatttctctcccctcttttataaaacttttaatttaaaaaacccttgttttcccaaattttttttctcttaaaacaaattccctttttcccactttttcaaaataaaaaaaaaacccccactatttctcctttcaaaatatttccctctttttattaatttacacccctttttacccctttttaatccctttttttttttatccccaatttccctttttttttaaacccttaaaccccccttttgtttttctcctttttttcccacaatccctttttccaaaaat

SEQ ID NO: 461843 - DNA, 400 bp, Sorghum bicolor
cgtgcgagcccctacagaagaggttgatgtggacatagcaacccacatagatatctatgatggccctgaaagaagcttacttgtggtggaagcagcggatcgtgcggggttgctggttgaccttgttaagatcatctcagacatcaacattaatgtccaatctggagagtttgatactgaggggctactggctaaagcaaaattccatgtcagctacaggggcaaaccactgatggaggctttaaaacaggttctttctaatagcttgcgctatttcttgaggcggcccacaacagaggacgctagcttctagccagatgatcatgatgaagcctcccaactttcttatgagatgggattcacatgaattggataccatcatcaaagcatttgaaacacg

SEQ ID NO: 461844 - DNA, 398 bp, Sorghum bicolor
cgtccgcccgcagtttggcccatgtcctatgcagcagcatggatttgcacggaatgtgaattggtctatcacagattcagaagtcatggaaggagatccaactgtaactttggaactgaaagatgactcttatagtcgttctatgtgggatttcagcttccatgcactgtacaaggtttccctgcactctacaagcttgtcaacaactctagaaataataaatacggatgtcaagcctttctcattcaactcagcactccacacttatttctctgcttccatagctggtgtttctgtgaaaggtctaaaaggttgcaaaactctcaataaggatcctgacccgaaaaatcctttggagggcaaagaagagagggaagaggtgacttttccaggattcg

SEQ ID NO: 461845 - DNA, 249 bp, Sorghum bicolor
  unsure (1)..(249): unsure at all n locations
cgtccgcgacgtctggctcccgttcctgacccgccgcggggtcggntacgtggcggcgatgtctgcgtgtcggggtgtcatgggagacgcgggcctgcgagctcgggcgaacacatggctatcaagtctggcacgtgggcgcggcgaacaacacagcggcggggtggtgggacggcccctctgatagaacccacggagcttttgctacctcgggcttctgtgttgtggttttgagcgggcttggtgcgt

SEQ ID NO: 461846 - DNA, 68 bp, Sorghum bicolor
tgcgtaccaactaatcgctgcacacatcctttcccgtgcgaaacaaaggccacacgcctcacatgcac

SEQ ID NO: 461847 - DNA, 199 bp, Sorghum bicolor
  unsure (1)..(199): unsure at all n locations
tccanattcccngtcgacccacgcgtgctaaaaaaaaaaaaatatcagcctctctaaataatccaaacttacttactcgtactttctacatcataattcttcccgattatttccgaaattctattcttttcctctctttttacaactcctatcactcgtaaatccctttcttaacctaatttatactccctttatcaca

SEQ ID NO: 461848 - DNA, 327 bp, Sorghum bicolor
cgtccgaaaaaaataaattaaaaaaattataaaaacaacatttattaaataaacattattttttaattttaaaacaaatccaaggccatattttagcaccatatttaattattccccatatactaatttctcttttcaacttttaaaaaatcttcggcctcctttttaaaaaacctaaatttacatactcaatcttttaatcttattttctttttatatcctcccctaaaaaaaactcttttcccattatttaaaaactttttttcttaaaaaccccttccattcccattttttattcttttattacttatcccctttttccaactt

SEQ ID NO: 461849 - DNA, 425 bp, Sorghum bicolor
  unsure (1)..(425): unsure at all n locations
cgtccgcgtgatcccttcttccgccaccaagaacccgccgccgccgccgccgactcgcgaggaatccaagacttccgacgaagaanaagaggaggaggaggaggaagaggaggcggcngacgactagatgccgcanacgaagcccgctgcaaatcaagaggtggggcctaagggcgcaaagcggccgagcgcgccgttccagcgcacctggtcgactgacgacgagttccgcatcctggaggtcctcgccgcgcaccgcctggagcacggcacgctgcctcaagcagacgtgctggccaacgctctcgccggtaagctcgacaacaagggctgcagcctctccgagctccagagtaaggtgaggagctngcagacccggtacaccaaagcggtcaagaaaggcgcgccgtcgagcaagggtcacg

SEQ ID NO: 461850 - DNA, 100 bp, Sorghum bicolor
cgtgcgttgatgtatctagggtgtctcaactatgtttcaaaaagtttggtactggttgttcctgctgactgtatgttaaggataactgggggtttaaaaa

SEQ ID NO: 461851 - DNA, 462 bp, Sorghum bicolor
acgcgtccggtcctggtggttcttcggctggccctgataatggtctgacaggaaacaatgcatcagaatctctgacaggaatgcggtgcatcagaggtcaccatagacgtgcgctcaacaaccacgcgtatcagatgtgacttgatttgttgagaacgtctttgacttttggcaccagatagaactactagctacgtgccgtgactgatccttagaagaattgcttcaccaagccaatatggaggatctgcttcctcatcgaatcctcaaaataatgagccagcagttgatggagctcgcattgctggagcaccttctgcagatcaagcatctaattcgagcactgttgcagtgatacaaggtgatgctggtatctctgagagtgcaggggagcctagcaatgcaagctcttcgagatccttgaggaggagagggaggagcaatatcttaggttcattggat

SEQ ID NO: 461852 - DNA, 275 bp, Sorghum bicolor
  unsure (1)..(275): unsure at all n locations
atgagggacgccgactagcggctggagtactggcggctcaagtacggcctcaccgactaggatctcgagaggtacaggcgcgacctnaaccaagaacacggtaacgacgactggttcgacatgtgaagcatccaatcggtagacaaggattttatgaacataataacccctgtttatccgtattgacccgattaaattcttgttgccattgcggaggcaccaacggaatttgggtcggcgttgcgtatatggaatccctttcccaatgttttata

SEQ ID NO: 461853 - DNA, 512 bp, Sorghum bicolor
ttcccggtcgaccacgcgtccgctacaagatgctcttggcaaggcaatttgttaaccctttctatttcacgattcttcatatgtttactgatagtattattcagttgctggggatgtgcaatagaaaagttaacttttttaatccttctgacacagttggataccaaaactcgactatgcattcgagatagtttgcttcgtttggcctatagtgcagcagagagacaaattgatggtgataggagcagcactaacaagactaataaagatgatgatgaagcttccgaaaatgatgcatctactaggagaacaaggtctccaactagggaagcagaaacgatcacaaatccaattgatcgtatagtggcccatttgctgtttcatagacattgctccaaggttgcaacagcaacaaaggaggaaatcatatcctcaacccccttgatactagaacctgaaccgaaggtacccttgggaactcctaggttgccatcacaagatcaacgagatga

SEQ ID NO: 461854 - DNA, 254 bp, Sorghum bicolor
cgtgcgcggacgcgtgggcggacgcgtggggggtcgcgcatgttgtcgtcgccgcattcaggaagtgcggcgtcgaggtcgccgaagacgcgtcgacgctgcacgagtgcgaggacctcgacggcatgttcgcgatacaggggagtcgccggctcgcgcacaccgatcagttcaggttcctggacaaggcagcggcggagactgcggccctctaggctgcgcgtccctcgagctcgttgcttttgttcacggtg

SEQ ID NO: 461855 - DNA, 193 bp, Sorghum bicolor
cgtgacagaccattcatagtaacatgcagaaacacactcagcagcctatctggaatgtggatatctaattgatctaccaggggcacttgacgagactgaatgtatgaaatgttcaccaatataccaacatgtttttataaatcaatctaatatgattgcttttgactcatataagatcaatgcacatgcatcc

SEQ ID NO: 461856 - DNA, 226 bp, Sorghum bicolor
cgtgcggcatcctcaagtccaacggcgaggactggctgcaccagaagaaaatcatcagcccaaagttattactggacaggagcacaggcatggcagatctgatagtccattctgctcaaccactgctgaagtcatggaaagagagagtagatagaaatgagggcatcacacacattaacatcgatgatgacattagggcttactttgcacatgttatctctagaac

SEQ ID NO: 461857 - DNA, 77 bp, Sorghum bicolor
attaactctatcaaaactcacggcttcctgaaaagtacaccccaacacggccaccctcggctaactccaccatcaaa

SEQ ID NO: 461858 - DNA, 86 bp, Sorghum bicolor
cgtgcggaaaaaaaatagtataaaaaaataataataaaaaataaataaataaataataaaaatataaaaaaaaataaaaaataaaa

SEQ ID NO: 461859 - DNA, 254 bp, Sorghum bicolor
cgtgcggccatggcaaaggcacaggcaatggccgcgctgatgctgaccgtcttggtggtcctggcggcgtctgccgagagggcgcacggcgtgtgcaacctgtcgagcgccggcatccaggcgtgccagccagcagcagacatccgcaacccgactgatcagccagaggacaaatactgagcctctctagctgatgtagacatcacatgcttttaccgccacaggaacctcaagctatgaatgtcctatacatt

SEQ ID NO: 461860 - DNA, 449 bp, Sorghum bicolor
cgtccgtaaagatgaatctatgggaagatacttagaaataggtgctcctaggaactcaagtgcagaatatcaatcatctgtcaatgacgtatctgttaatccaacagaaaaacgtcatgagactcacatgccccaatgcaaatccaaaaagaaaatgatggcagaagatgattgtacagacatacctagtgaaataaatactgaaactgctgatttgattagctcaatagccagaaacacagaaggccatcttgatactactccagcaactcttgagcaatcaacttctgtttgcccaaatactgcagtttcacagccatggtcagcatatgcgatggcaacatcagtcatggctcctttcgaaaggaatgaccaattaccaggtaagcaaggcttcgtgtttgggcctagcaaggcagaagcccttaataaccggcactcatggaaag

SEQ ID NO: 461861 - DNA, 351 bp, Sorghum bicolor
cgtgcggttcaaaacgaaatatgttgtagtttagtttagagcaacaatctacttggcaagtgacaatgcaactcgcagtattctctaactcagtgaactcatggcagtggagtttttacttaactgatgatccctgattattttgcaataaaattgtaatcactgcgtattttctgcctcttttataactgctaatcggatctatcgtattaccaacaagacttatgtcagtatagaacttccatattcagagttcgcctattttgaattgtttctaccaagtgattgatctgctgtcattttatggttcgcacctgtcaactttatgtgccagctttacttcacatgtta

SEQ ID NO: 461862 - DNA, 227 bp, Sorghum bicolor
cgtccggtttttttttttttttttttttttttttttttttttttttttttttttttttttttttttttttttttttttttttttgggtttgggtgttttttttttttttttttggggggagaaaaaaaaaaatcttgggggggtttttttaaatttagtgggggttttttaattgttttagattaaaaactatttcattggggggttaattttttttttttaaagag

SEQ ID NO: 461863 - DNA, 170 bp, Sorghum bicolor
catccagtacaaagaaacatattgctatccacgcattctcacacatctttatctacagactttgagtgctgcaaaaatgtactctgtcctacataggtggagctgggattgatattacgaatgcgaatattgacattaaccatatttggaattatgctgaggtgcttgtt

SEQ ID NO: 461864 - DNA, 237 bp, Sorghum bicolor
cgtccggagtctggacgaccgttgcctcatgcacatgttgaggtttcttagcccaagcccagatggcgcttgcttgcatgccaccctcagctgtggctgcgtgtttagaggccaatcagagatgctatggagcctgcagtttatccaaatcgtgaggccgccgtatttgctgctgggcctggtgacaccatttgtattgcggttggtggtgcccatgttgcgtgtaacattcaaatt

SEQ ID NO: 461865 - DNA, 305 bp, Sorghum bicolor
  unsure (1)..(305): unsure at all n locations
cgtccggaggtactgggcggcacctgtttaactccagcacaggacaaggtagtgcaagagaaagccatggccatcaaagctgaagtgtccatgggtgtggcgaccatgaataagaaaattcttggctacaacaactaagcgttcatcctagacttcagtgatgccgctgagtatttgcccgacgggaagcaatctcttacactaccttggcaggggcaaggaaggtcatggcgcacagtcttgcncaacctgctgatgcttgccaccggagaatggcgcgagtttgtgcgcgacagctgcctata

SEQ ID NO: 461866 - DNA, 182 bp, Sorghum bicolor
cgtccgaaaaggaggtgtattggaagcaagctctcgggcaatattctacctgcagttattcaacaacttaatacacaaataatgagtttgagagagcatggggatctttaaatgcgggttgcagaccagtgaagtttcttgcaactctgaggacatggtgccgtggaggcacatggtggact

SEQ ID NO: 461867 - DNA, 155 bp, Sorghum bicolor
cgtgcgccggaacctgaacctaaacctgagcctcaacctaaacccatgccgaagccagagccaaagcccaaaccctaaccgatgccgagagccgaggcctgaaccaaagccaaagccaaaagccaaaaaagctcttaccaaaaccaaaacctgag

SEQ ID NO: 461868 - DNA, 157 bp, Sorghum bicolor
catccagcctgggctggcttctcttcttggatgggccgtttcctctgatctgattgaaccatgtcccactacatgtgctgtgtgattatgtggggaggcgggtgcgatgaataaaacgttcagattctggatgctatatccaaaccatacaaatgga

SEQ ID NO: 461869 - DNA, 328 bp, Sorghum bicolor
cgtgcgggtctttcaatcagatcaaaccaatgcacacatataacagcatagattaagtcagtaatatcaaaataatcggactgaacatattaggggtagatgagcgcccaatgcagaataccctcttgacaccaccttttgcagatgttgttaacatgtcaccaacacaattcggattgcagaaacaaaatcaattgccacttcaaattcctagatccttccctgttcctggttattcaagaatggtttacaaagaagatagggacgacgactactactatgatggtagtgacaatgtttagttgcatgagacttcaccaaattcaat

SEQ ID NO: 461870 - DNA, 155 bp, Sorghum bicolor
cgtgcggtcgcagagagaggtgcacgcttggctgctgctggtatatatggtattctgaagaagcttggcaaagacaaattgcttagggactgtggtcaacaaaggactgcagttgctattgatggtggcttatacgagcattacaagaagttcag

SEQ ID NO: 461871 - DNA, 331 bp, Sorghum bicolor
cgtccgcccacgcgttcgcccacgcgtccggtggaggaaggttgggtcgataagacctgcaagatctgcaagaaggacacaaggggggagccaggacaggttgacaaactaggaagatatgctcatgtggcatgcttggagaacccaaaaccgatgaacttctttgccaaaatcttcgcgagatgaactatgtaattgtttcactcatgggtagatgcaataggtagcgttctggcttcaaagggccaaaggtttgttgtgcacattttttttttcaaatgaattgggatatactgagaatcagcgcatttcatagttcacaattttttca

SEQ ID NO: 461872 - DNA, 250 bp, Sorghum bicolor
cgtccggccaatgactgggataataaaaggctaaatccaggaaatgacaattatccactttcgacagcaggtccaaataatttgtttttgggtgttgagcaaggagctggaagcagcaatggccagggcgccttttccaagtttgacaatgggagctcaatggcattaccatttgggccggggatgtgtggtctgatgggaaaaggggcaaaatggcgcgatggggactggtttggcaacaactggaaca

SEQ ID NO: 461873 - DNA, 156 bp, Sorghum bicolor
cgtgcgcgatcagctcaaacaagctgatgacgagttagctctgtattgctaagatcaatgaaattgccgagtcatactctgtctatggaggtgcatataccttacgattggaagacacatatataatgcatggtttttttctggaacacctcccta

SEQ ID NO: 461874 - DNA, 168 bp, Sorghum bicolor
  unsure (1)..(168): unsure at all n locations
cgtccgggaaggtggcgagggcagaggaacgaccagcgtgctcttggtggccagagggagggtggtgacctatgtcgcgaagaagaggctgagccanattgtggtcttgatcttcatcgagctgaagcgggtactggtgagcaagaacaacanatgaactgctacatt

SEQ ID NO: 461875 - DNA, 137 bp, Sorghum bicolor
cgtgcgtattattggaactggtcgatcaggaactatgtacagagcaacactttcagatgggttatgtcttgctatcaagaaggtggaggacggtgaacattcataggatcaatttacatttgagatgtgaacactag

SEQ ID NO: 461876 - DNA, 487 bp, Sorghum bicolor
cgtccggttaaatacagagatctcgaggagaagatggaaaggtatgagatggagaggagttcaatgcttgtggatgaggacccagacaccaaggtaaaggagaaagagatagcggctgcagcagagaagctggcagagtgccaggagactatattgattcttggccgtcagctgcaagctatgcgttctccagccgaatcactaggctcttcacctaatcggcaacgcatggaggagtttctggaggacgctgtaggaacaacctgaggagaatatttccagaagccttcaggccaacctgatacagaccaggagatacttgggacaggaaatgtgtctccagtcaatggatacaagacacacatgatcccttctgatgcggacgggagcccttttctttctcctaacagctccaagcgcccgaagcatctgtcgagatcctcttcgtctttctcattcaccaatcacccgttgccagacaaacaga

SEQ ID NO: 461877 - DNA, 57 bp, Sorghum bicolor
cgtcgtggactgagtacggaagatgaacatggagagtcaccagagaagcggcgggat

SEQ ID NO: 461878 - DNA, 89 bp, Sorghum bicolor
gcgtccgcggcaccggcaccgggcgacgactgcgggcgccaccgcgcagtcgtcgtcgccgccgtcgtcgacgaaggtctttctatgga

SEQ ID NO: 461879 - DNA, 341 bp, Sorghum bicolor
  unsure (1)..(341): unsure at all n locations
cgtacgtaagcagaatcgcgagcaccaccatgatgctagtcaaattgggatgtgtgtaaatgcttaccctggtgtatatggggctggggaggtgagccagatacctatagctgtaggacagatgtgtcattatgccagaaattattgtaccaaactacattctgtttgtacaaaatcttgtccacgagacaacacctatgatgcttcagatgctcttatgtcataccatgtctttaaggtggttttgttggtcttggcttagcctgtgattgtttttttggagtatggagacgaggggcaagccactgttgccatgaacaaccttnaaagcttcaagattt

SEQ ID NO: 461880 - DNA, 130 bp, Sorghum bicolor
cgtgcgaaacaagacagatagggcagctatgctagatgagatccttgattacgtgaagtttcttaggcttcaagtaaaggtttggagtatgagcggacttggtggtgctggtggagtttgacgtttggtt

SEQ ID NO: 461881 - DNA, 157 bp, Sorghum bicolor
cgtccgacgatggcagcaatggccaacaccacatccttccgttcccgcctgctcgtcctctcaccgtcaccggcgccccgcaccgtcgtgtgctttcgtctccgcccatgcgctaccacggtcttctcgtgctcccagaggaggaggaggccccgcc

SEQ ID NO: 461882 - DNA, 278 bp, Sorghum bicolor
cgtccgcccacgcgttcgcccacgcgtccggtgattccttccttttctttgttagttgctgctgctggtgtcccccgtttccaatcccttttgcatggggatttgagatgtgcctcctcagctgcgtcgtccgatccagttcctctgcacattcgatctcttccatgtactgcttcgattgatgcttgattattaattcctagttgtttgtttaaccagttcgttcttctttttttttaagagaatgattttatgatgagtggttataagatattttg

SEQ ID NO: 461883 - DNA, 382 bp, Sorghum bicolor
cgtccggtgttctccagttcgacttttttgggacgttcaagcggatcttcaaggcggcctgctgtctctagtagccgagagccaagcactgaagcagagcaaacacgtagccgcacgactgacgcaagcccaggggcattccagaggtctggagccccacggtggagcccgcagatgcctgacttctcggacggcaggcgctcgtttttcggcaggcgccactcatctaacccgaagaactacgagtctaccattaggggcatgcagggcctaaacttcgacggcgacgacagggttcactattagcatcttatctgttgtttgggacctgacatggtgcattcgcggtgcgctgcccccccataggatgctccaatgtgtc

SEQ ID NO: 461884 - DNA, 179 bp, Sorghum bicolor
  unsure (1)..(179): unsure at all n locations
cgtccagggccaccagggacgggtggctgcagcggatgcacccgaacaacgggtcctgggagcggtggcgcttcgtcggcggcacggggctgctcgggagtcacgccgtccgcggacggtaccatgctcgtctgcgacncctgcaagggacttctgagagtcggggaggaaggagtgac

SEQ ID NO: 461885 - DNA, 332 bp, Sorghum bicolor
cgtccgctcttcacaagctcggcagaaaggtacttcgggctgtagtgccggctgccgttccatgtagagttgtcaacaaggatatgaaaccgcctcactgcattgcttggcaacctctgcacctctacgaagtacagcaacaggaggtatgatgtgttggcattgtttatgggggaattctagctccatgcgaagttgatctgggtttcattcactggagtggtggcactccctagtatcttggttgacgtgtggaagctgctgatgttggagacataaatgggtgttgagctttgtattgttggagcatgcattcatgtcggcatatgcct

SEQ ID NO: 461886 - DNA, 61 bp, Sorghum bicolor
  unsure (1)..(61): unsure at all n locations
cgtccgcggacgcgtgggaaaaaaaaaaaaaacttaaaaaaagaaaaanaagatgtaaagg

SEQ ID NO: 461887 - DNA, 81 bp, Sorghum bicolor
cgtccgcaggagcagatatcgtaggtggagaagatttgattgaacaaataaaaggaggatttatggagtttgacaaattga

SEQ ID NO: 461888 - DNA, 130 bp, Sorghum bicolor
tgcagtaccgtccgtattcccggtcgaccacgcgtccgcccacgcgtccgaaaaaaaaaaaaaaaaaaaacaaaaacaaaaaaaaatagggcgcccgactataaagaaaacaagctaaaagtacacgggg

SEQ ID NO: 461889 - DNA, 449 bp, Sorghum bicolor
cgtccgacctaccctgggttcgaacactacccatgccatggcatcctcgacccaatcacacgaccttcctcgccgcgagcgcgcgaagcacccagccatggtagccctccccaccccggcacgcgttctacccccacccctgcgccggccctaaacatgtccgatggactccatggtgtcctggcccctaccaccccatggattcggcagcgcccgttgtagggggcattcttcctccatgtgcatactacccaatgccggcagcgacctagatgctgcagctgactcggatgattgtgatgctgttgcggtacctctaaaagctctccttgcggcttgtgtggaccaacgggccaaggaaattgttgaaaagctgttcgcttacttgggacagtgtgattgcacgaagaaagctagcaatgctgcaaccggcatgtgtgataagcaca

SEQ ID NO: 461890 - DNA, 368 bp, Sorghum bicolor
cgtccgacacgctcctcatccaggtctgtgccttgctttttgtttgttgatattgattcgaaggtcatcactgccccagtgtatggtttcaattggtttaagttgattagacttttattctgctaccgatctaaattagcaagaaaccactatattgtagaataaaaaggaaaaacaaaattactgtgtacacacgcaattgacagatgtttatttttaatgtgaactttccattggcaggagtggaatgggagttcaagtcccactgctttagtttatgacgaacaattttaaggtactttttggaccattttcaggctcgcttttgtgagacacattttttgtacttcatttacaggtcctaaact

SEQ ID NO: 461891 - DNA, 168 bp, Sorghum bicolor
cgtccggtatactatgtaagtacatgtctgttcttcaagactagttgtaattgagctgagcatacttggtgttgctgaggtgtagttaatattgtgcagggggcaaatcacacgaaggaagatgtaaaaacatagtggaaatggttatttttgggagatctattttaa

SEQ ID NO: 461892 - DNA, 357 bp, Sorghum bicolor
  unsure (1)..(357): unsure at all n locations
cgtccggggtaggtagttgtgctcttctcccctgtcccagaggccgcctgcgtctccgcttcgtctcaccacccaccaccttcttcttgccgggggacgcctcgccggagccaccagagcttccggcgaagaaatccggcgggcacaccacaagggggcggagcaggggggacggtggcgcgcgcgccggaatggggggccagcggccggtcgtcgtcagcgctggtgtcgcgtcgctctagggttaggtaggtgtacagtgctttcttacctagggttggctccccgcggccagggctgtgctggcccggcgtcgcattgggggtncccggccgaccgtctggccgtgtgattcac

SEQ ID NO: 461893 - DNA, 425 bp, Sorghum bicolor
  unsure (1)..(425): unsure at all n locations
cgtccgggaaaactctggatattcaagtatttacattcagcgatctggagacaaaagagatggctggggtatattctataaacctaaaagtgcagagggggtgcataaagaaggaatacattacaatgatttagtggaaaaatacgttcctagtgatcatgtaaatagtgcccaggaaaataattctttaacagaagaagacaggaatgcaaaaccagataatagcaagcgtggagatccaaatgatccacgtgtaagattgaagcgtgactgtgttggtctgctcgcagctttcaagcttagtgatccttgtgatcacattttaattgnggcaaacacacatatttattgggacccanaatggatcgatgttaagttggctcaagcaaaatatcttctttcgagagtatctcagtttgagcaac

SEQ ID NO: 461894 - DNA, 175 bp, Sorghum bicolor
cgtgcgggttattaatgctatgactctattcgatgaaatgactgatgatgggatcagtcctgatgatgccacattatgggtcactaggtgggggggtctgtaagaggaacatggccgaaggagcactggagcttttgaatcatatgcttgctctcagctttgaggttaaagcaac

SEQ ID NO: 461895 - DNA, 441 bp, Sorghum bicolor
  unsure (1)..(441): unsure at all n locations
cgtccgctagaggcatcgtatacccgccggcggcggccaacacccaccagttcaagaggctgaacctgaagaaaaattattggaggcctgaccatactaccagagagctggaacatcgtcaccaaggtccactaccacgccgccatcgaggaccaatgccacatccgctcaaccattgctgataccagtctgtgccgttgctgaaggtgtcgccgtgaggggaagctgcgccatcacagattgccagaggggaacaaacaagacctaggagtggcgacgacatcgcgtaagccgagcggtagcggcaacacgcattggtgacgagcgttgaaggccacgcataggcaccgagattataagagctagaaaactactattggaggactccagtttaaaacaataaaagatactattagcttgtcatcttagcnaagagagaaa

SEQ ID NO: 461896 - DNA, 134 bp, Sorghum bicolor
  unsure (1)..(134): unsure at all n locations
cgaaaaaaaaanaaaaaaaaaaaaaaaaaaataaagggcgcgttagtcagtactcctctcactatctttttggactaataatatgccgcgttacacgcggctggaacccgcgaccactaatgctgacacatcct

SEQ ID NO: 461897 - DNA, 364 bp, Sorghum bicolor
  unsure (1)..(364): unsure at all n locations
tacggtccgaattccctggccgctccggagtttcgttgtctggcaggctcatgcccaacaccaagcattatgagtccactctaaggagcatccaaggcctaaatgttgatgccaatgataggatccactactagcatcttgtggatcccgtggacgtgtacaatctatatgatatcttgaagtccagatgaagagcaagtatgtaacttccaagctacctgctggaggagcaaggccacttgttgacccagcactgcactctaggcgaaataaagggctgtctgtgttctggagcagctnttgtcttaagaaatggcatcatggccatgttttagctctgtacaggttctgatttgtccataat

SEQ ID NO: 461898 - DNA, 75 bp, Sorghum bicolor
  unsure (1)..(75): unsure at all n locations
cccggtcgaccacgcgtgcgccgctgtggttccncggcgccgtggcgcccgactacctcgacggcacgctggtcg

SEQ ID NO: 461899 - DNA, 141 bp, Sorghum bicolor
gcacgcgtccgagcgaagccacacaacgctctgacacccgacacggcggaagcagaggccaaatatcacgagaaagccatttttgcccagatggggtgcgactctatctaccaggggattggcacacaaaaatccacaatc

SEQ ID NO: 461900 - DNA, 395 bp, Sorghum bicolor
ccggtcgacccacgcgtccgctaaggctaagcaattggatattgtctcttcagaactgcaatcagaattgataagtttggaatcacgatatgattgtcctgacgtgaatggcagtcttagcctagaaggtctttcctcggtgagagcagcagttgttcttcctctcaaaatggataaaggtggacctcggactgcactttttaggctatgcaagagattgcagtggccaattccagaatttgaatttgtggaacaaaggttcaggactcctattgttctggatggggttacaaccacaaacttcaatagcttcgtttcaactattaccttgcacatacctgatgtgactgtcattacacttcaaggtgagcgccggactgacaagaagagttctc

SEQ ID NO: 461901 - DNA, 350 bp, Sorghum bicolor
cgtccgggtacccctccattattttggccaaacgtcgtccaccagcctcccatccatggatccaccagcctcccatcaaacctccttcccaccggcgtcggcgagcctcccctcactggccgcggcgggcctcgcccagcccccaccggtagcagcacgatcaggtcagcgcgctcggtggcgctcctcctctagcagatccagccgtgagtggctcgcctcgtgcaggtgcggcccgttggtggtgcggctccaccacaaggcaacaacggcagttgcccctcaacctttcccagcggatccaccgcacagggctcgtccccttcatcaatatggcgtagggcttccgt

SEQ ID NO: 461902 - DNA, 51 bp, Sorghum bicolor
cgtccgcatgactgctaataagtgacataataaccatttactgtcttgctg

SEQ ID NO: 461903 - DNA, 283 bp, Sorghum bicolor
cgtccgccaaggtgatgcccatgggcaccttgtatccgttcagtcctcaagctggatggtgaagcgtctgtgtaccatgtaccttgttgtgccttgcgtgatgggctataggatccccgaggagacaatgacaccaaagagcagtgagaagttcacgatgtaggctgggctctttggtgcttgccttcatagccagaagcgttggcaggaaagactagagcggttgtgcatggtgacgtggtgtccgaggtgcaatggaggtgggtcagtgatgacatgtttt

SEQ ID NO: 461904 - DNA, 170 bp, Sorghum bicolor
cgtccgcgagctcctcccaaccacgctctgaatagccgttcccttctcctgcctttgctctgcacgccgcaccgcacgtcctctccgaagcagagacgttcccgtccgtccgttccccgggccatggccgcggccctcgtttgctgcgccggaccggtcaccagcgctcg

SEQ ID NO: 461905 - DNA, 70 bp, Sorghum bicolor
ccacacgcgcaatgatgctttgttggcatacctaatggcgtgcaagatgcatgatgacatcagcttgcgg

SEQ ID NO: 461906 - DNA, 55 bp, Sorghum bicolor
  unsure (1)..(55): unsure at all n locations
cgtccgaaaaaaaaaaaaatataaatcgtcaaataaacataataatntataaggt

SEQ ID NO: 461907 - DNA, 393 bp, Sorghum bicolor
  unsure (1)..(393): unsure at all n locations
cgtccgctcctccaggcaccagcggtcatggcggtggcctcagcctcgcccctcccctcggcgccgtcagccaagcccgccacggccccctcgcctctcgctccctcgtccgggttcctcgctctccgagcccgccgctgcggcgcaccgcgcctncgccccgccgncgccgcgtggaggaggcttcgcgtggaggcaatcaggacgcagcaagagaagcagcggacggaggtgcccgtcgaggagtccgcccccatcaggggcgccgtcgcgcccctcgacggagtcggagcggacgaccccatggttgcttcctcggacgagagctgggtggtcaggctcgagcagtcgttcaacaatttcggcacggaatcgatgattatgatactcgat

SEQ ID NO: 461908 - DNA, 205 bp, Sorghum bicolor
gtccgatccgcagccgcccagcgcgccacctagcaccgcgcgctctctctctggactttctcttgcgactgcactgcggaccgcggggtcgggcaaacaccacgcgccgagcttaatcaacctgcgagcttgatgtggacgacacgctaacaagaatgggctatgcaacactaccatttgtgaaagggctgacactagcatcacc

SEQ ID NO: 461909 - DNA, 428 bp, Sorghum bicolor
cgtccggcacctgctgctctggggacccaagtgaaggtgaagtgaggccggccgggcatgtcctcctccgatccagtcctcagtacgttcctcaccgaggtcggtcttcgatctctgccgcgccggtgtttctggcgatcccggccgctggccgcacgtacggattgggattgtacctatactacgactgctgtaccatactagcagtgtacagtattattgtactagtagtaaaactgctgctgcttcttcttcttgcaccactttgctgtttgctcgatcgactgctcgtcgcatcggtcagtttggttttcaactgtaagctctctagctaataagctgtagtgtggtgttacagtactgtgttaactggtgtggttcactggtttggactctggagcagcagattattattaccctctcgatct

SEQ ID NO: 461910 - DNA, 84 bp, Sorghum bicolor
tccgtcgccacgcgtcggaggcagagcctcgctgtgtgacggagagacgagctctgggacactagtcggctgtcagtggacttg

SEQ ID NO: 461911 - DNA, 133 bp, Sorghum bicolor
cgttcgcttgcgtcttctacgtgctaccacggctcttactcgcctacataccatgcctttgccttcgccagatgacatgaagacacgaggtgtccgctcatatcccagatattcgagcgactacaaatgcgac

SEQ ID NO: 461912 - DNA, 403 bp, Sorghum bicolor
cgtccgcaatcaaccaaatcaatgctttccagctcattgggatgtcctcctgccttgatctatctggattttctgagaaagaggtaagctcaatgtttgctccaatctaattttttcatatgttttaatttcctcacatctactaaagactttaaatttgaactaagtcctatcccagatctacatacaaagcaagtcctaagttggaattggaagagttcaaggagatggtaaaaatgttaaaaagtgtacgaaaagaatagcagccaggaaccagaaattgacacagcctgctttgtttagttatctatgtgcctttattgggcattaacattgttaataatactctagagatattgatgtttttcatagtcatcataaccttccactaaagtcatacatg

SEQ ID NO: 461913 - DNA, 208 bp, Sorghum bicolor
tttttaaacaaatcctgaacgtaagatgagtataagcgtaactgggggatctggcgacacgatgatcgagcactgaacatgaacatgaacatagatcgtcttctatggatgcatgctcccgtaacggttcacttagcctggtgccatgcccagtgtcgcatggcggtgtagttcctacagacaacagcatggttctgaggacagtgag

SEQ ID NO: 461914 - DNA, 235 bp, Sorghum bicolor
gatgggcataaaccgacagcctgtgttttatatttattattacacccaaaatggtgatgcagagaattcttgttacattattggccttagaatacaactgcgcggaggcagaggaggatggttcaaatgttggttggtggggcgtcggattcagggtcccagcctggaggcttgatgttgggccaatcgcctctgcaaccaagcctgatgtagaggctctttttccctgccagct

SEQ ID NO: 461915 - DNA, 115 bp, Sorghum bicolor
gcgtccgaaaataaaaaaaaaatacatattctaccacataagttataaaaaacttattactgggtgatctgttttgatgatctcttcttacttacgcgggcttgcttctaattat

SEQ ID NO: 461916 - DNA, 388 bp, Sorghum bicolor
cgtccggtggaatgttgcttgatctgccacagtagtgatctgggtgattgggtgaactgtggagtatgtggagaatgggcccaccttggctgtgatagacggcaagggctaggcaatttcaaggactactcaaagacaggcgggctggaatacatttgtccccactgtagccatgcgaagtcaccattgcctgtacaagtaggcaatgactcatagaatatacagcatctgcaccatgaaatatgtcaattagcttatgttatttttcacctgttaccccccaattcttaggggtgatggtgtgggtagagaatagtggctatggatgtgcagattgtagtggtgaccttgattattgaatatggaccagaagttttaaagttgatac

SEQ ID NO: 461917 - DNA, 417 bp, Sorghum bicolor
cgtccgggtgaatggttaattaaagaagaaaacaagaagatcaaaggacatttagacattcctgagttttcatttggtgagattgatgacttggaggtacaagtaaggttcagtgatgacaagggcctcgcatctgaagacaaaacacggatttgcaaggatctcaagacctttctggcgtcgattcaagagaaaatgcgcgtgtttgaagaagagctcaaaggtagatagcaagtatattagcaagaataggcagtgctaggtaagttacttggcgctgccgtgctagatttgagtaaaacatatcaaattgaggtgttgccgtcttgtggtgtcggcacgttctgaagtcgtctttggatgactggaactgtatgtggttcatgttatgttatgcacttgctgagatgagcacgt

SEQ ID NO: 461918 - DNA, 467 bp, Sorghum bicolor
cgtccgcgctggctgtgctggatcgactactaccgtggcatcatcttctgcgacgtgtttggaaatcccacccctaccgtctccttgctccgcttccctctggatgagtttcctatccggggcaaaccatccagttggctgtatcgtggcgcgtctgacatcggtggtggagagctcaagttcgtcgacgttgcccgccatgacggcgttggctatggggcactcaaaaccagtgttggtggcttcaccatcacctgccacaccctctccttagaatccatggagtgggagaaggactacacgatcacctccaaggagctctggtctgcaaacaccccaaaggacctaccacgccacattctcatgttcccttatgtggacatctacaggtcacatgtggtgcacttcctttgctgtgactatgagtacgtgatgatgaagacgtgggtggtcaccatcaacatgtg

SEQ ID NO: 461919 - DNA, 175 bp, Sorghum bicolor
gcgtccggatgatctgatgtagatttacgcctcctgtgtgtagcggtggtcgattgtgtaagctgggggttgggtggtgttggataccggcgccgccgccgcaacaactggcggacgcgtggccgggccggtgactctgattttttattttaattaaatctcgccgacatttcaa

SEQ ID NO: 461920 - DNA, 52 bp, Sorghum bicolor
  unsure (1)..(52): unsure at all n locations
tcgacccacgcgtccgtaaaaaaaaaaaanttnaaaaataaagatggggatt

SEQ ID NO: 461921 - DNA, 350 bp, Sorghum bicolor
cgtccgctgaaggatggcaaagacgggaacgttgtgtatcctgactctcctttgattggttcatctgaaatcaagtttatatctacaaacaaagctattcatcttgaacctattaaggatagctggtactccaatgtactttatcttgggaatgagggtgaacttccaattctaactatgacgtgccccgcatcagatattgagaggttcaaatctggtgagctgcctttagcacctccatcagagacatatgcggccactctgataaggggactagttgaaggaaagcaactggatgcggacggagctgccaactacatcaatgcttgtgctgcaaaaggcctgtgaag

SEQ ID NO: 461922 - DNA, 122 bp, Sorghum bicolor
cgtccgcccacgcgtccgcggacgcgtgggtggtggcgccgccgtccagggcgcagggcctgccgtccctcggccgccgcgcctcctccttcgccgaagtttgcggcaccgccaagaagatc

SEQ ID NO: 461923 - DNA, 155 bp, Sorghum bicolor
cgaccacgcgtccgtaaaaaaaaaaaaaataaaaaaaaaaagaactaaaaaaaaaggaagttgtatggtgaagatataaataatctaaaccaatggccggtctgaaaaaaaggggggtggcttggcggctcaggggttccacgcctacgccctcc

SEQ ID NO: 461924 - DNA, 280 bp, Sorghum bicolor
cgtccgcacacgacaggcctgacgcgcagctactgtttcatatcactgctcgcgcaactgtgcaccgaacatcactacatccatcgtgctggctgagagctgctggtgctggttgtgcttcacttgccacgagatctgcgtcgccttggagagcgccgcagccatcatgggcagcatgggcttcctgtgcgcagcgcgagaccaggacaagaacaaaggagacagccggtaccgcgcggtcatgatggtgcgccagtgactctaccggcttgctgtctgc

SEQ ID NO: 461925 - DNA, 296 bp, Sorghum bicolor
  unsure (1)..(296): unsure at all n locations
cgtccggtaggatcagcagagattatattcagcgggaaagctcaacctggcgttactgcatcggatgtcaatgtggaagaggtgagaatgatagtcgacgaggatgttggaggttttggtttcaccagcgagaatgaactgatcaatggaaaagccgctataatcggctntctcttgttgatagatttcgagcttttaactggcaagggcctcctcaaggngactggtttcttggacttcatctatgcagtttcgggagctttcaactgataactatgtttgttcctttgtatcag

SEQ ID NO: 461926 - DNA, 175 bp, Sorghum bicolor
cgtgcgctcgacctctccgcgcggggcctcggcgatccggagaccacgctcaccaagatccaccccgtctgcccgcctagcctcagcaggcgagccggtggcacagggtacttccgctaagtgactcaggctcagctgtgaccgacccaaagctatgttgatacaagctgtttgg

SEQ ID NO: 461927 - DNA, 199 bp, Sorghum bicolor
cgtccgatctaatctacatccacattaaacgccccgcacgacatgctgtcatccactgcacacgatctttcacaaacgaatgccatctcacggttgtggactttgctcaccgattctgcagcactgaccaaactcttcctacactgcctcggacgacgtcagtcatcccctctttgatgaactgccacacccaaactca

SEQ ID NO: 461928 - DNA, 98 bp, Sorghum bicolor
cgacccacgcgtgcggcgtgtggtggcagggcgcctagaccacgggcgtcaactgcgaaagcaagactcctccgtctatgcggtcggcgtcaggctgc

SEQ ID NO: 461929 - DNA, 161 bp, Sorghum bicolor
cgcgcgaccacatgaggctgagagctggggcggctacttcctctttcggtgggagaccgggggccgcacgggctgtgctggggcaacaggccgcatggcgccggcgcaggtggcgcgcagcactacaactgaagctctgaccccgaggggaggtggagctg

SEQ ID NO: 461930 - DNA, 94 bp, Sorghum bicolor
cgtcgcgggtgggatatgacacttcttctcgcactgtccttactcgtcgcttcatgcacatgcaacaactggaatccattgctactgtgactct

SEQ ID NO: 461931 - DNA, 192 bp, Sorghum bicolor
cgtgcgcctcctcctccccctcggcgctggacgcgcctccgggcggcggcgtcgagttctggcacggtgcggagcgcgcgggttgggtgaacaagcaaggcagtcataagactggaggcgggtggttggctaagcagggaggcttttggtaagacctggggaccgcctgggcgggggtatccggcttgctaa

SEQ ID NO: 461932 - DNA, 276 bp, Sorghum bicolor
cgtgcggcaggatgaaaactgtgaggaagcgaagaaggatctgagaagcaggggcctgtgcctcgtccctgtgagctgcacgctggacgtgggtgtggacatggtcgctggccccggaaactactgggcggcagctgcaccagctttaggcatggggttcggtgggtagatcatggacgacatgtgtgtacatctcacgcggcatgcgcgcatattggcctgcatgcatgatgcataacatcaggagcagccatcctggtagaaagagaatgttca

SEQ ID NO: 461933 - DNA, 136 bp, Sorghum bicolor
gaattcccgctaaccacgctgcggcacgataaaactttcattaacccaacaacgatctgaaaagtacgagactgttcctcctacctatgagctgtacacttggcgctgttgtttaattcatcgctagccacaaaaa

SEQ ID NO: 461934 - DNA, 198 bp, Sorghum bicolor
gtcgaccacgcgtccgcggacgcgtgggaaaaaaggcaccagcaccaccgccgcgacgacaacgatggcagcctcgttccaagccgcggccccctggaggcagggcggccaaaatcggcggccgggcgcactccgcctcgttgccgtcccggccgtcgtcgaacctcgccggggcgttcggcgtcaacgccggcgccg

SEQ ID NO: 461935 - DNA, 179 bp, Sorghum bicolor
  unsure (1)..(179): unsure at all n locations
cgtgcggaggcaccgaagcaacaacaaaggcgcacgcgagaaacaagaacaaggcggatcgcagcaacaactgcaaactgcgcatggcgatgtgcgtgagcgcggagaggtggacgcgggtgctgacgctgggccgcggcgcgttcggngcagaggtgttcctggccaccgaccacgat

SEQ ID NO: 461936 - DNA, 246 bp, Sorghum bicolor
  unsure (1)..(246): unsure at all n locations
acgtccgaaagaaaaaaaaaaaaaaaaaaaaaaaaangccaaccaaaaattaaaaaaaaagatttttttttattaaaaaacataaaaaaataatccccgccaacttttataaaaaattaggtctatccctacacaaaattttttataaacatacaaaaacacatacaaaatcctattctccctcggctttgtattctcctatctacaaacccgcaaaccacanaaatacccattttttttatccct

SEQ ID NO: 461937 - DNA, 296 bp, Sorghum bicolor
  unsure (1)..(296): unsure at all n locations
cgtccggcacagccgacgccgctccacctccacctcactagccggccacaacgaccacggcggggaggatgccggcgacggctcgctcggcgacgcctcgcggggaggcgctgttcgtgctggcgcanctgggccggaagctcgacagcctgccgtctgatctcgccgccgccatcgagagcggccggatcgggggcgacatcgtggcccgcttcaacgaactcgaggccaacggtttcatcaaatggctcctcaccttcaagggcttcagggagagactcctcgccgacgaactc

SEQ ID NO: 461938 - DNA, 361 bp, Sorghum bicolor
cgtgcggtagagccgacgccgctccaccttcatcctcactagccagccacaacgaccacggcggggagagatgccggcgacggctctctcggcgaggctggcggtgaggcgctgcgcgtgctggcgcagctggaccggaagctcgacagcctgccgtatgatctagccgccgccatcgatagcggtcggatcgggggcgacataggggaccgattcaacgaactataggcctacggattcattaaatggcttctaaccttcaagggcttcacggagagacttctctcctaccaacggttgcttaccaagctcgggatacagtgcggcatcagtttccagggccagactgccccttagtttc

SEQ ID NO: 461939 - DNA, 172 bp, Sorghum bicolor
gaccacgcgtccgcttgttcaggccccgccccgcccggaggtaggcatacgcggtaagcctcatctcttctcagtcgcctcgctcgaattcaaaccagggggcgaggtttacttaggaagcgaggcgcgcgatcagtctgctgaagccaatatgttggctgggctggtgacc

SEQ ID NO: 461940 - DNA, 366 bp, Sorghum bicolor
aacatcaaacacatccccgccattctttataaaaaactgggtgaagcactcacataactatttcaaatacatccatcaaccatcccaccctcaatcagacgcgcctcatcattcctcaaaacaaagatgggggagaattcccacccccaatttttggccctcttcaccccattgaacaaaccaaactcttaagtacaacattaaatcaacgcctggtataaactttacccttcaagaacattatacaccatacattccaaaaaaactctcccctaccattcgcatatttactgaatcacccacccaagaacaaatcccttcaggtactgcactccaatttccaaaagcttaaaacatacaatgcca

SEQ ID NO: 461941 - DNA, 71 bp, Sorghum bicolor
cgtccggcaagtgctaaactcgcttcctttccaccacgcacatactatcaccaccttgcaactcgcgttct

SEQ ID NO: 461942 - DNA, 256 bp, Sorghum bicolor
  unsure (1)..(256): unsure at all n locations
cgtccgcttcttcaggccccgccccgcccgggggtaggcgtaggcggtaggcctcagctcggctcagccgcctcgctcgaagtcgaaccagagagcgaagcatatcaaatgaagcgaggcgcgcgggctggcggcggatgcgaaaatgtcggccgngctggtgaccgacgaggccaccgtggggcggctctaccggatccggcgcacggtgatgcaaatgctgcgtgaccgtggcctccctgtggggagcacgagc

SEQ ID NO: 461943 - DNA, 201 bp, Sorghum bicolor
  unsure (1)..(201): unsure at all n locations
ccgcccagaggtaggcgtangcggtaggcctcagctcagtctcattcgnctcgctcgaagtcgaaccagaaggccaggcttancataggaagcgaggcgcgcggtctnncttcngtggctaatatgtcggctgtgctggtgacctacgaggccatcgtggggcggttctaccagatccggcgcacggtgatgcagatgctg

SEQ ID NO: 461944 - DNA, 106 bp, Sorghum bicolor
ttcccgggtccaccccgcgtccgcccacgcgtccctaaaaaaaaaaaaataaaaaaaaaaaactttaaatacttcctttacttatattcacctaatacactaactt

SEQ ID NO: 461945 - DNA, 279 bp, Sorghum bicolor
gacgacccacgcggccgaataaaccacgctaacacattggtctggaagaactctaccatcatcacaacgctacatgcacctatcacacaagcttatatggcgcctggcgtatcatatatacacactgggatctaccgtcacaatcttattacataacgtaatgaaagcatcaaagcatctaggaaacagaatgctgaactaaccctagcttgacaaatatgcaaagacatcaaatctgatacttcaaaagcgatggataccttacagatatcattccat

SEQ ID NO: 461946 - DNA, 169 bp, Sorghum bicolor
cgtgcgataaattcgggttttgtggagaaaaatcatgcttctactgtaaagcttgactctgtcgactgtggctgctttggctcttgagtaagttattcttgttgtgtccactgaaactacactaatgaacgaagcacaatgccagagtataatgaattggcatcagcgc

SEQ ID NO: 461947 - DNA, 264 bp, Sorghum bicolor
cgtccggcaagaactggtggtactcttgagggagtgccgcccaggcgcagaggtgatggtcaggactcatccaatatggggaagtggcgaggagaactttgtctcatcacaggggcggcagggtggtggcaatcggtttggatactctggtagaggtggagtatctggtcaaagtggtggccaccagagggacaggggcaaccagtgttcccggggaggttacggtggcggtttacggtttcaagatggaaggggtcggaacca

SEQ ID NO: 461948 - DNA, 307 bp, Sorghum bicolor
  unsure (1)..(307): unsure at all n locations
tcgccacgcgtcgactcgtaaattaacttacacancgtatgactattaactcagctacactgacattgatccttggctgctgcaacgcgtacattgtgggctttgcaatgaacatccacctctctgtacaacactgatggcagcctcttctggccatttgtcgggggcacctcatccgcctgctttgtaatcaccgtcctcttattttggtatgcctggtggaagaagctgctgggtccttgagcacgaagcgaagacaagatggcagagagccttgtcatgtttgcagaaagggaagcaagcgttc

SEQ ID NO: 461949 - DNA, 357 bp, Sorghum bicolor
acgcgtccgagaggatcgccaagtagtatgccttatagcttatatagagtatgatgaatgaatattaacttattctcaattcatcgagatagaagatggtgagggctgacacttcttggcgatacaaggaaataaatgactctagaaaataagaaagataaccaaaggctcgtcttgagcacaactatattggcacattcctggggattctgtctgcccttgggcttctcatagctcaatgtcacgtcctcattatgtttgcatcatttctatttcatattctgctatggatctcctttgccaatatgtcatgcaatgctggacttcttaatttatcaataagtaggacatcatttt

SEQ ID NO: 461950 - DNA, 67 bp, Sorghum bicolor
cgtccgaaaggaaaatagatacattaacaagaaggcttgctagtggtatcaatatcaatgctctatc

SEQ ID NO: 461951 - DNA, 122 bp, Sorghum bicolor
tctacggtgagaaagtcctcattcagtttgaggactttgccgatcataatgcctttgatttgcttgaaaaatacagcaagacccatcttgttttcaatgatgatatccagggcacagcatca

SEQ ID NO: 461952 - DNA, 337 bp, Sorghum bicolor
  unsure (1)..(337): unsure at all n locations
cgtccgggagccattcggtggcattcggaactggaggcatgaaaagaccaggcaggacaccttttgctggtccacagcgattgatctccgtggaggatgtcatttgtgcccttgagagggagcctcanatgacaaaatcacggctcatctaccggctgcacgagcggtttcctgtagattcaactgtagattaaaccggaataggcatatactccgcactggtgcggtgcatgcccaattgcccttgcatggtactccgtaattaacaacgaataagcatacctgtcactccttccaattggggtggtttggagtggcactggatattggtagaaaa

SEQ ID NO: 461953 - DNA, 152 bp, Sorghum bicolor
acaccacattctaactaaataccaaatcactacactccaacacccttaaaacacaccactttcacccattttcccatccaaccttcaaactcaaactctcaatctgaccgcattccttttatcaaactcaaccccacctccaacaatatttc

SEQ ID NO: 461954 - DNA, 254 bp, Sorghum bicolor
aaaattaaacggaacaaaactaattaaaccctaaatccaccacattctaaacccatacaacttcactccactccaacacccttaaaacacaccacactcacacatgttcatatccaaaattaaatctaaaactttaacccttaccgcattcactttaacatattcaaccccactttcaacatatttcaaaaaacccatactatctcctacaccaccaataacaacttcaataaccccaagttttaaccaacctt

SEQ ID NO: 461955 - DNA, 540 bp, Sorghum bicolor
cgtccgcggacgcgtgggcggacgcgtgggctctggtatttctcagatgtttatctgctgtgggccggttcaagctccagccatctaagtaggaggtggctgttgcatattgtgaaacatcgtgatatttattttgggcatcttaagctatcctctggcacattaaagatttcattagcttcaaggtgcctttcttttataagttgattccatacttgcataatcttcactcaggtgtccacaaactcgtgagttaactgtggacttggctgtcactagtctgattgaagcatcatggtgcaaatcctgcttcaagatctgctattgatagcttagagatagctgtactgtcaacgcctcttcatcattttggacttctaggctctctgtgtatttatgctgtatatgagcatatggggcatcctctataatggtggatctcatatactgcgctttggagttcctttcaacttcacttgggaggcttttgatatgccacaaatagagtcatgtgaggcccagaacatcagtttctcactg

SEQ ID NO: 461956 - DNA, 490 bp, Sorghum bicolor
gaggggaaacatcacaatcttatttcaaaaatcatagagagaccatgcatcaacagttgaggaccagccatggggtcaacaataacacaaggaagcaacagaaattgttgtaaaaaaaaaagaatcaacagaaatttcggtgggcattttacttgtgtacttaactattactatattattataataggataatcctgatcttatttcacaaatcatataggtgacctattacagatggtacagtccaatgccaatgcaattcctccaggagaatgacttagatgtagatcagcagtcagcagattgcaactctcaaccctcaacctgggtccccggcacaggctgttcctgttgttgcatgaatgactcgtaggtctccaccctggtctttgattcaagcttgttaagtcaatgcttgaaaccatttgtcatcgcagggaaatccttcatatgcagtttcttccactcctcaaaatcccattcgccataa

SEQ ID NO: 461957 - DNA, 254 bp, Sorghum bicolor
cgtccgcggacgcgtgggaaaaaaaaaaaaaaaaaaaaaaaaaaaaaaaaaaaaaaaaaaaaaaaagagaaaagttttatttttaaaaaataaaaaaaaaaaaaataaaaaataatattaaaaaatttatttttttttaaaatttaaattaaatttttatcgttttttataattaaaacattattttttattaaaattaatataacttttaactttttttttttttttacaaatatattattttttttaatatt

SEQ ID NO: 461958 - DNA, 465 bp, Sorghum bicolor
  unsure (1)..(465): unsure at all n locations
tacggaccgnattccgggtgcgacccacgcgtcccccacacgtacaaactttacaactccctttctaaatattttaacttgagcggggtgggttttacaccaaaagacaatcacatacctcttgcatctgaccatcaaactgcaactgctgctcaagctacatgttcaacaacaagtacccccacactaagcacaaaaacacactccagcaagccaccatcttcctaattgtcacctccaaaaacacagctgctacctcaattctaatcctaccccaattcctgcaaccacacctcccaccactgcatctgctgcacacagctccaagtgcaacccctacaacttcttatcgacccactaccactcattggaaacgaagacctacaatatgcatgcttctgattatttaatagtgatatctatcttctacctgctacgtaccgcactactagctactacactaca

SEQ ID NO: 461959 - DNA, 371 bp, Sorghum bicolor
ccaggcgtacgcccacgcgtccgcaatctcgcctctcgcatcgcaatctcaacacccaatcaaagcaagccgcgctgtgtttttatcaaccggccgatcgcaatggccatggcaccgtgctcacctgtctcctccgttcccttggccgcccgcccggctgctacggggtctccttcgtctgtccgtccgcgcgccgccgccgccgtcgtcgctggggttgtccccacggctggggcgacgtagggcggcacgttgttggcgccgctgctgaagtggtcctggatggccgactaccttcaggccccggcgccggcggtgccgcatgacgaccaggctgtctctctcttcatgcatttcgtggatggccttac

SEQ ID NO: 461960 - DNA, 444 bp, Sorghum bicolor
  unsure (1)..(444): unsure at all n locations
atccgcccaactctcnctccagaccagatctctataaaaagtaagcccccaccttccaccgacnacatggcggggaaaggagccaaagccacggccaccaattcgtcagacaaggacaaggggaataaagcctgcatccccgtctcacactcctcccacacctcacctcaagagaaggagaagtcatctcccaagaaagatgtttatcaattattcactgagaatgttaatgataacaaacaactgtaatctagatagtcaatcatgcaagaaacccgtgtagagtattttcttgaaaaaaatttcaataccttcatcaagaatcatccataattcaagaaaatttctccgccacataatgatttataatttaaatacattgtcaacacttttcttaccaaaaacccttattaataaaatttaatccaattatttaaaaacttt

SEQ ID NO: 461961 - DNA, 429 bp, Sorghum bicolor
cgtccgcccacgcgtccgaaaaaaaaaaaaaaaaaaaaaaaaaaaaaaaaaaaaaaaaaaaagagaaagagtattttaaaaaaaaggaaaaacaacataaaaaaaaaaaaaataaagggcggatattttttagtttccaagctttctatcccttccatccaacttcatttcattttctctagtttctccaaaatccaatccattaccccccttttttcacctacctaacttgcaaacccctgccttccccttttttaatctcttttcataacttacccttcttcccaattttctttttacctaaattgcccatcctaatcgccctttcaaacactccctatacctgaatattaaatgcgaccccccttttagcccctctttattccccccgtcctctgtccttccccctagaatccccttctttctttt

SEQ ID NO: 461962 - DNA, 503 bp, Sorghum bicolor
  unsure (1)..(503): unsure at all n locations
aangataatttcgattcatttttttttatagggaggcccacaaactccaattggatgaacacgaatttccatttaaaatgtgaagttgcttcatgcttcaaagaagcagagtccaacacatatataatcatcgaaaaagaaaggaaaatcctctcaaaactctaatgcctgttactcacacagtaacatgttacaatcacaaaatgtacaattgcatcacaggcaatttgcatccttgtcgcctgggctctgcaatttcagacaaccatttttttcttctgttcctgtctgcactcgccgccaatcaaatcagcacccatacaaggcatcagcagggcctcaacctcaagttcgccatgctgacgatttctcctgatcaacattctcttcccaccaagtaacattcttgtatccttcttttaaaaaatctaatgagctttccttgatctttttgcaaaccaaaaactcttaacagttcttccttaacctgtcccaaagtgaac

SEQ ID NO: 461963 - DNA, 55 bp, Sorghum bicolor
aaaaaaagagaaaaaaaaaaaaaaaaaaaaaaaaaaaaaaaaaaaaaaaaaaaaa

SEQ ID NO: 461964 - DNA, 398 bp, Sorghum bicolor
tttttgaacaaagaagataagggcgctttactactaatggaaaaactcaattacaagtttacaattgcacatacgcatcatgaaatcgaattaattaagccaacacaaacacgtacgtacacgtgcagcaaaagtttcatgcagctgcactaccgttctcttgtagcatacagaatttgaagccatggatctcatgtcatacgtcacagctacgcaaagaagcagctatatcgatcaggtccgcttgacggggtcgaagttggagacggcgacaactgcgccgacgatggcgacgagcacgacgccgccggacgcgatgctgagcaggaagttcttgagcgactgcgacagcgcctgcgccgcctccgccacctcgagcaccgccagcgccgtcgaca

SEQ ID NO: 461965 - DNA, 545 bp, Sorghum bicolor
cgtccggccgccgccgagcggcgtgtcgtcgttctacggcggcgagtcccgggccccgtcgccggcgtgacaggccggcgccgacgccgagcctccagggccggcacgcccggaccgtgccggacgaggtgtcgcggctgcagcgggagaacgaggagctcaagatggagctgctgcggatgaagatgcacatgagggagccgcccgcggcgctcccgcagcccagcggcgctccaccgccggggcgccgcccgccgccgaagaaggccgcgggtggcagcgggggcttcatgaacaacgtgtccaagaagctcgggcggctgaacccgttcctgcggcttgatgccgtgggcacggagccgcccaaggatcggagacggaggcgctccatcgaatggtgattggtgaagttgcccatgctcatgtggcaggcttctttcgtcctgaatttttttgacgggaaatttcatctttatgtaacttaaaaaatgacttggatcgcgggaaatggtttcgagtttgtggagttaaaatataaggtaggc

SEQ ID NO: 461966 - DNA, 96 bp, Sorghum bicolor
ggatcgagcctgtcactgctgaattggctatggctcgttgtatcttctttgctaccgacaaaagataaaagtgaatggatgaaatcccttacgatt

SEQ ID NO: 461967 - DNA, 446 bp, Sorghum bicolor
cgtccgcccacacgctcacttttacgcttacctctctttcgatctacaatacgacccagaccaggcgactgggcagctcactcggccgagcacgcgccccaccacgggccggacgcaaccctcagcgcaaccctcacccgacccggccgtcgaggtggcactccgccgcgcgagcccccacccggcgggccaccactgaggacacgactgatgtaacgaccagtgcaccaaccaggccacgaccggtgcgcatcggcgtcgccatcctttgcctcttctcttgctcctcctgccctgccttgggtggcggggccacactcaggcccatgctctccgggatcgactccatcggtcggaccactattgatagtactatagacaaccgctgaatcgaccattgaatagcacattcaccacgcatataaacacgcactcccaattgcacg

SEQ ID NO: 461968 - DNA, 75 bp, Sorghum bicolor
cgtccgaaaaaaaaaaaaaaaaaaaaaaaaaaaaaaaaaaaaaaaaaaaaaaaaaaaaaaaaaaaaaggggaggg

SEQ ID NO: 461969 - DNA, 82 bp, Sorghum bicolor
cgtccgcggacgcgtgggtttttttttttttttttttttttttttttttgactagttctagggcgggatctataactagtac

SEQ ID NO: 461970 - DNA, 436 bp, Sorghum bicolor
cgtccgaaaaaaaaaaaaaaaaaaaaaaaaaaaaaaaaaataacaaacactctaaaaaaatccaaacagagatgcgcattcaataccacacaataaactcccccctatctacacctaaattccttccactccccacctttccacaccttacatactcctaaaaccccctcaatacccttctttatcccctctcataccacctccccttcctccaactcccttactacccacaaatcacccacctatccccccccccaacattttcccaccctgaataccgccttaaacccgccctctacccccccattaaccactcccccagccctaattacacacatcacaccccctacacttaccacccccctaccccccgctcttttctttctcctccctactttctttcccacttccaccgcctttcccccccaatctctaa

SEQ ID NO: 461971 - DNA, 299 bp, Sorghum bicolor
tcccgtaaccataacaatacctttcaataatccaccctttaacaattttactactttgcacctaatacgtaggtttttttttctacaatacacctcccatctccacacacacatacaccattatatctcataactaagacatacacatcaactccataaaaatcatcacaacacttctactctcatccttcacccccctcctatcatagctctatcccaacactttccaccctaaactccccaagcctcaaactcatccccaacttctacctcaccatatacaacgtcccttccttcaa

SEQ ID NO: 461972 - DNA, 204 bp, Sorghum bicolor
ctcgtgtcccgccggcggccaccaccatcaccgccatgatcagcatcctcgcgcaggagcgcctccttgggttcgccctgggctccgtctccatgggcggcttcgtcctccaccagcgccgcgccatctaccgctcaatcgctgaagccgacgggtcgccctacttctaccagcctggtgaaaattgccagtcgaaggaagctc

SEQ ID NO: 461973 - DNA, 489 bp, Sorghum bicolor
  unsure (1)..(489): unsure at all n locations
cgtccgatcccctgtcatctaccatcatctgctatgtgggactacaaatatcctgaggtattctggaagatggaagatcaagaaatcatgatgtgatagaagatgaagaaaccttgatgttggcttatttggttatggtaaataaggccctcactattgaaagctgaaggaatacatctatattggtcaggccactcggctatctgcctagcagatttgcagtacttgtacttcctagctatgcttgcattagtatgggtttcagtattttaaaatatacagtgatactggaggtatgcttatgatgtatgtatctattagtgtgcaaaatagtttgtatcagtttgtggaatagtgtgcaatacaaggacgctctatatgcatcatgtacttatttatctctgttgntattgcgccgaacaaatagcagcataatcttgtttgcagttattattcaatagaatatgaatttgatgccaaatgaatatt

SEQ ID NO: 461974 - DNA, 576 bp, Sorghum bicolor
  unsure (1)..(576): unsure at all n locations
cgtccgcccacgcgtccgctttttacatttcctagagcacaagtaaaaggttttgtgtgcagatcttaagctagcagatctgaagtgtgtggctgcagtaccattttttttttgaaaggagattacctctgcttttgagaaagcaattagagtttacatactggtgataccagtttatgagaacgtgaaaagacaaaacagatagcaaccaagccacactactaacatcctcaacatgaaacactattacaagatagcaatttctgaattaaaagtttgaagccgatcaagcttgctgatccatgtctctaggccctccactatcttagaagattgtatcttgtcggcgtccttcgtaagctctctccacatttgcagaagggtgattgcgttgtaaagtaccacatcagggtttgcagggaaaactttctgaataaccatactgttcctatttttccaaattgcccatgaaagggcggcaaagaaaattaacacaagtcttcgagggacttncagcctnnctggcaatcaatcatacatgatatttatgtttgacgtcngaaagtcatgccaccc

SEQ ID NO: 461975 - DNA, 80 bp, Sorghum bicolor
cgtccgcggacgcgtgggaaaaaaaaaaaaaaaaaaaaaaaaaaaaaaaaaaaaaaaaaaacggacagtatatttttata

SEQ ID NO: 461976 - DNA, 400 bp, Sorghum bicolor
ccggattcccggttggttggttcgattctttcttctttttttttttttttttttatctttttttttttttttttttttttttttgggtttgtttttattcaaaaagaacgacccccccttctaaaaaacccaaatttacccccccctccatgcaaaataatatctcttttattgggcaccccaaattcaattaactgcccgcctaaaacaacccaatgactggaaaaaccctggctttacccaaataaaaccccttccaacacatccccctttccccagctggcaaaaaaacaaaaaggcccccaccatattcccttccaaaaaaatgcccaacctaattggcaaaaggaaccccccctttatagcccaataaacccccccgggtgggggggttaccccc

SEQ ID NO: 461977 - DNA, 134 bp, Sorghum bicolor
aatataagaaaatttttttttttcttttttaggaaaaaaaatattttttaatcaaaaacattaaaaaatttttaaattacccaaaaaaagaattatattcaaatttacaaaaaaaaaaaaaggattttacaaaa

SEQ ID NO: 461978 - DNA, 131 bp, Sorghum bicolor
  unsure (1)..(131): unsure at all n locations
cgtccgcccacgcgtccgaaaaaaaaaaaaaaaaaaaaaaaaaaaaaaaaaaaaaaaaaaaaaggagggaaaaattaaaaaaaaaagaaaaaaaaaaaaaaaaaaaaaaaaaangggggcggccgttctaa

SEQ ID NO: 461979 - DNA, 330 bp, Sorghum bicolor
cgtccgcccacgcgtgcgctgttttacttggaataggcacaacattccttctctcaggatacacgcgtgaggtgagtacgagagaggtgcactacacccaaaacatcatcaaagtgcttgaaaacgtgcttaaaagcgtggactctgcacgcgctccatgtcattaatagaaactacagcaggttcttacagaactgaaacacaaggacataacacaagtacctgcttctggcagggaaacggtctgccgtctgacttgacgtggcgccgctattcgcatggcagctccgcatgctgcagccggtggatgtgtacctgttcaagaacccc

SEQ ID NO: 461980 - DNA, 263 bp, Sorghum bicolor
cgtccgaaaaaaaaaaaaaaaaaaaaaaaaaaaaaaaaaaaaacggtctgacgatataaaagggtccaggcttacatacacgtacgtgccacaccatagctggtcccatctataacctaaaatcatttcactggccttcattttacaacctggtgattgacaaaacccccacattacaaaccttaatcgccctaaactaaatcccctttttgccaaatcccttaatagccaatagtcaatcacctatcaacctttccaacatt

SEQ ID NO: 461981 - DNA, 60 bp, Sorghum bicolor
  unsure (1)..(60): unsure at all n locations
ccctntctaatcnactctntaaatcaaccaccactccccaaatatctnttcttcctaccc

SEQ ID NO: 461982 - DNA, 131 bp, Sorghum bicolor
aaaaaaaaaaaacaaaaaaaaaaaaaaaaaaaaaaaaaaaaaaaaaggggcggggtgttctataaaatccaagcttacctacctccatatgctacgaacctgctcatgtaacctacccattaaatataaac

SEQ ID NO: 461983 - DNA, 314 bp, Sorghum bicolor
  unsure (1)..(314): unsure at all n locations
aaaaaannataaaaaaggaaaaaatttattaaaaaatccaaatttaaaaaagattaataaaaaaaaaaaaaatttttttaaaattaaaaaaaaaaaataatatgcattttttaaaaaaagaaaaaaaaaaaaaaatttggagtaaaaccatttaaaaaaattataaaaaaattattttttataaagatgttttttatgaaaaaaaaaaaaagggttgtatttttaaaaaatttgcccccaccctacctatacaataaccccccccccaaccccccccctacccccctatctctccctttcccccccattccccc

SEQ ID NO: 461984 - DNA, 295 bp, Sorghum bicolor
cgtccgttaatgctccgccatacagtctaatgcaaggagatttgccttgcagtgttgattgaccatgaatgaacaggagacgatggatccgcagttgcctatggcctgactgtagctatgataagtctacatacgttcaaaaagtgatatgtagacatatagatggttctacggatggtgtaacattgtagacttgcagtagtagcagggtttagtgaaaagaagtggttcataaaaaaaaaaaaaactaaaaagcaaaaacaaaaaataaaagataaaataacaaaaaaacacc

SEQ ID NO: 461985 - DNA, 574 bp, Sorghum bicolor
  unsure (1)..(574): unsure at all n locations
cgtccgtgcggatgacatcagggaggagttgaaatcttcagaagctaacctagacttatgttcacagctgggagctgtattaggaatgcttggggactgctgtcggaccttgggagatgttccttcagcaatcacttactatgaagaaagtgctgagttcctctcgaaaccccctgcaaaagatcttgagctggttcatactctctctgtttcactaaataaaattggtgaccttcgctactatgatggcgatcttcaatctgcaagaaactactatgcccgttcattagatgttcgcagaaatgcagtaaaagaacactctgcagtggcttctcaggtcattgatctagcaacttctcttgccaaagtcgcggatgtggatagaaatcttgggaatgaaagtgcagcagttgagggttttgaggaagcaattcaatgccttgagaagttgaagctggattctgaacaagctagccttngacagcggcgcctctcggtcttgactttctacacaaccaattggcagataaataagacatggtcttctcctaagaattcgccaacaacagatgtc

SEQ ID NO: 461986 - DNA, 465 bp, Sorghum bicolor
cgtccggtcatactgtgatgtttttggttgacagatgcacatttttttttattttgagacctgtggactggatctagcacatacaagattatcttacactattctacgttgcatcataggagtactgaagaaatcatttgaacctgctgtgaatgcttcaagagataggactgcaggagaacattttgtaagctgcgctactgagctttctgctactccattttatattagggtcttacttttgtgtatattctctactggtatgcttgtccattttttgttgttatttgtaaatctatattatgattcatggcgacatatagggcattggaggaaacatcagtgatctacagtgtagccaaagagagatggtaatagactgtctttctggttctgatggcaaggagggtattgcaaaagcaggcaagttactttgctcaacttacatcaatggtgatactcatg

SEQ ID NO: 461987 - DNA, 347 bp, Sorghum bicolor
cgtccgagcacgcgagcgggctcaccagcgtctacatcctcttctacatgctcatggtcccgcatgacgggccggctgacggcctgtggtccagcttactgttcacatgtcagcaataacgtgagcgaaaactctctcgatatgaaacaccacattgattaggacattaaattgctcatgtgattggttatgatacagcatataccacaccagatattaccagcatgtctaccgacatacatgtcagacatcatgacagagctatgtgttggactatgagcacgactcgttgaaataatcactggcatacgagcatgcacgccatcatgcaggccatggacgatata

SEQ ID NO: 461988 - DNA, 83 bp, Sorghum bicolor
  unsure (1)..(83): unsure at all n locations
gcgcgtccgnaaaaaaaaaaaaaaaaaaaaaaaaaaaaaaaaaaaaaaaaaaaaaaaaaaaaaaaaaaaagaggaaggggagg

SEQ ID NO: 461989 - DNA, 420 bp, Sorghum bicolor
cgtccgcccacgcgtccggcccatcaaaagtgtgatctgaactgacaacggcggcttgaatcttcgggcagggcattttataggatgggtttgctatgtcagtatttgtgtgtgttagcttgagtgtaaagctggttccgtctgtgcggtcgaacgctgcaaaaggcacgtggacagtggcacctggggctgcgcctgctgctcccctaaacgtactgtttttttttagaaactgaaggcccaaaaaaatctttcagttggttcaggtaaaaagggttggagaattcatgggttccaaaaaaaaaaaaaaaaaaaaaaaaaaaaaaaaaaaaaataaaaaaaaaaaaaaaaaaaaaaaaaaaaaaaaaaaaaaaaaaaaaggggggcccctttaaaggatccaagcttacctacccctgc

SEQ ID NO: 461990 - DNA, 269 bp, Sorghum bicolor
  unsure (1)..(269): unsure at all n locations
ccgggttcgacccacgccgtctcgagggagtttcgacgagacagagatgcgctacaaacaaatcctnntaaaaaaacccgtagagaggcttgagtcgatgtccccttcgtgaaaccccnttccagagctagtataaacccacgagcgcataaggagtaagngnatactatcaagaccagcagcgtcnncaatatccaacaataggagggacaatgatnngaggaccgatgantnncaggagnncatgagctnnacaaaagnngctaaaa

SEQ ID NO: 461991 - DNA, 133 bp, Sorghum bicolor
tttgcagtgctatacgaaagccgccgtcgcttcacatgcagctgatggatggcccctgacgcataccggtgggtcccgggcgtcatgcggcaccctctgtttctctttcatgcgttcgagtaacggtctagtc

SEQ ID NO: 461992 - DNA, 216 bp, Sorghum bicolor
  unsure (1)..(216): unsure at all n locations
ccagcgccctctactnctaangatactcatttccaatcatnatccatactcttcttcttgattccaatcatcatataaaatcaggccagcgcggtctctatctaaaatctagcctccttctatgcccactgtaattcagctttatcatataacaatcctactctttactactactaacaactcttcatacttaataaaaaaaaaaaaaaaccctct

SEQ ID NO: 461993 - DNA, 101 bp, Sorghum bicolor
cgatcgtcgccacggcggaagaaaaaaaaaaaaaaagggcgttaggccagctactcctgctcacggatgcgtttatagggacctaagtcattactgcctgc

SEQ ID NO: 461994 - DNA, 449 bp, Sorghum bicolor
  unsure (1)..(449): unsure at all n locations
cgtccgccgactcgtgcggcgacgcgtncncccacgcgttcatccacgcgttcgacgtcttctacttattcctcgcccctccgataatcatgaactggatgaggcgtggggtgcttcaagcgcgaatgcggggagacttacctccacttcattcacctacctcttcttcccagggttgatgttgagggcgccattcgtcaacttcaagaagttcccgagggatcctaccatgaagtacccttggtccaagccaaatgagggcacgccgctgttcaaagacagatactcgcctatagacacctataagcagacttgatatttgtactcggccggctcgtcctcacggacacgcaacaaaagatttctctacctcaatctgtgtcaaaacaatatcacagtctaataatacccgtgctagtacatggaaaagctactctcgagactcaaaa

SEQ ID NO: 461995 - DNA, 174 bp, Sorghum bicolor
  unsure (1)..(174): unsure at all n locations
cgtccgggtacttgtagtccaaactgtagtatttgtaaaggatcttaccacagcctgtatggctgtaacttggggcactgggcggggcatgtgatgctggtgtgagaactgttttattcagggtgtaagaaacatanaccctacaagttattttggaggttgattaacaattta

SEQ ID NO: 461996 - DNA, 598 bp, Sorghum bicolor
  unsure (1)..(598): unsure at all n locations
cgtccggacatatcaggatgcattggtacctaccttcttttactaattaatttttatttatttgtctagtcatcactgtaaaagtttaaggttaaagctggctagttgatatatgaaagtcaacctactggaagactcatattgatcataaatcacattatctaaatgaaaaaagaaaagtgtcatgtgcatataagattgttgtattggtatatgtgaacacctccagttactttcagatttagtcagcttcatgacaacggtcaacatgtgcatatataatccagctgttcaatgaagatttctgattntctaagtctgtctgtcaggtttgcagtgtaaatctcatggagggtgacataattgtgagtggttcagatggactttttgacaatatttttgaccaagagatcctttccataatttctgagtcaccaggtgtagatgaagctggntaaatttctgcttccacaacaggggtcattggaccacatgttccagtccctttctaaaaccatgtngaacttttacacagcaaaagcgttggcagagcttgcaagaaaacattccgtggatgtcacattcgattcaccctact

SEQ ID NO: 461997 - DNA, 439 bp, Sorghum bicolor
cgtccgtgtgcttgtactgagaacaatttgcttgtacttagaacaatttgcttattatcattgcatcagattactaaaaaacttggaacaaaggtattggggctttcaaaaatagtcatttacatacaaataagtgagtacaatattatttatgaccagatttgcatataaatagtctctcacgccttcaagggcattacagacatttctacacatcctacagtttcacagctgctctaaccaaacggttttcagcttttcccacagctctcagctcacagcagattttccacagccacagttcacagcagctgtttcaaaatctacatctcaaccaaacagggcctgatgcggcaacttaagtgggttcgataatcctaaaactctgaataatgatcttcttacaactctgcgtgtcttgaaaaaaaaacaaattaca

SEQ ID NO: 461998 - DNA, 162 bp, Sorghum bicolor
  unsure (1)..(162): unsure at all n locations
ataaaaagtaaacaaatttacatacacatacnttcggcggccggggttttctattctaacatccgcatccattccactcnacctctctttctattttancgtctcttaaattcattgccctgcccttctcaatatcacttgctggacaaacccttttctccc

SEQ ID NO: 461999 - DNA, 332 bp, Sorghum bicolor
  unsure (1)..(332): unsure at all n locations
caaatcttaacctanacaccccatctttcttcnttatccaattctcaaatattntttcacgcgcaacgcttctaaatattaaagtccttcacaacccaaaatattacaacttcttttaatacactttcattaacaatnaactcacttacatttttattccaaacaaattctatctttttatacttctaaactgatctcttatattcttctacacattgcattcaatacaacttctattgttcccatctttcaaagttaactaatttataaaatacctctttaaacttttatgcaaattacccttaaactcactacatttctcataaaattaa

SEQ ID NO: 462000 - DNA, 427 bp, Sorghum bicolor
cgtccgattgcctctatatttgggccaagttatgctccggagcaccctcctggcaatttcgtctcatgtacaaggttctcaccttccaatccacaaacagggtactggtcagagagcacaggcttcgtctcggactcttccatgccggcccaccctagcggcattgtacatagaggaaggtatccagatagggcatgtgcctcttcagccgaaccgctcgcttcggcgcatcagcggagtgggtacggtcggtatccccttagtcgagatggttttgttcaaacatctgggttttgccaaatgtaatcggcttacatttcatttcatagttgtagctggtgctcggcagctgcggttagcactgccactaatgctgcctcatgtccttttatttctgatgaggcatattaaattttagctgcatacc

SEQ ID NO: 462001 - DNA, 416 bp, Sorghum bicolor
ggtggaaacaggggtattggattataattccatttacaactcttgttgtttcaagtcacctcacttcacaacaatggtggaaaatcctaaacaaatcctatcagaaatacattcacaagccaacctagacacctagttcacctaaagaaaaaaaaaacagtatttgatatcaatctgatagacttccaatttcctatccaatatagacctacagtgtttgcttttttaaatgtcgacaagttgcctgtttgcactctaacctcgtaataatactgaaatcaactacttgttgatatcagcaggagtgaaggaccatttcaactgtcattcaagaagcttgttgcaagtgccaatgccaatctcagcagcaagatgccatgcaccgtggatatatggagtcttggggaagcaatcgt

SEQ ID NO: 462002 - DNA, 270 bp, Sorghum bicolor
  unsure (1)..(270): unsure at all n locations
tgcatccacgagtacatgcgctcaaagtacttctgcacggactaccggaacaagaacccggataagacgctcgctacggcgatatccacgccgatattctgcggcaagttctaccgggagttcgagcacaaggtagacgactagccaaacgaattcgccgccgacattcacgacgaccggaagaacaacgacaagatgacggtcgtggtgtaggacacnccggaggatcgcaaggcggctgtgaagctgaagctgaccccggacacgacg

SEQ ID NO: 462003 - DNA, 507 bp, Sorghum bicolor
  unsure (1)..(507): unsure at all n locations
cgttcgagcgcaggctgtgaaagcacttgacatctctctcaagatagacactgagctcgctcttcaggttggaagacgtacaaatcgtgcttgagtccacgacattactattgtgcacgcggtgccacatctncaagatgataggaaacacgtggcanaatcagcttaaataacttagcgtgtcgctgagacctctgactgcaactacatgggattcatccttcagtttcatccaaaatgcagtaaataccttaaatttggaacagaataattggcaggacagacaggttgcttccagcatttgttctagcaccaagtttggaagctggaaaagcttgcgttgtgcggcaggtatgcaggcaggcagataggagtacatcttcctgcgcccagccacagctcgacagcaagtaggtttactgtaaacgggatgtcgcactgaacttgcaataccacaaacaaaaaatcgagaataagatgcttatcttactgccttcggtgacaaaa

SEQ ID NO: 462004 - DNA, 524 bp, Sorghum bicolor
gaatgacccatgcgtccacccactcgtccgggagaggggaggagagaagagacaccgcaaccgcattgccatgagagggaagggggccttgctgctcgtgcgtcgtctgaatgagctcgcgcactgccgccccccggcccaggtatgcatgccatattccggcatctctgaattgaagatggcggcagcagcatccatggcggcccgtggcggcgctctcgttgcgatcagcaggccgagcaggaggatgggtggctgcagggcggaaccgccgcgtttcttggtcgtcagctgcgacgccaggacagcggacgtctactcctccctggctgcaaagattttgggacctcccatgaccttcaatgcggcgaagctcaaggtggagttcgccggggaggacaagcagccgccttctttccctcgagcctacactctgacccactgcgacttcacggcgaacctgacgctggccgtgagcggtcccatgaccaccagcgagcagctgcgcagctggcagtcgacgc

SEQ ID NO: 462005 - DNA, 118 bp, Sorghum bicolor
  unsure (1)..(118): unsure at all n locations
ccgtccgaatcagattaagaagtctttaggagcaaagcgcaggagttnngttttgaattccaagcgacttccacttcgcttgnncaatcgattatttgttctnntgatgtnntgttga

SEQ ID NO: 462006 - DNA, 74 bp, Sorghum bicolor
caccagcctcctggcttagcgggcgcactcaagcgtgaggccacagaagcgcactcactactatagcgcttctc

SEQ ID NO: 462007 - DNA, 256 bp, Sorghum bicolor
tagagactacgcttctacaccaaatatccaattccatcgagatatttcttctacaatcagtgctgctatgaacggggggcgtcatatacaccgggataatatactattttaattaaacacatgcatcatcttaattaactctacgaaaccattacctatcagtttctctacactatattcttcatgtctgttctaccttgatgactccatctaatctaataacaccattcatttttctttttacacatacaccttt

SEQ ID NO: 462008 - DNA, 552 bp, Sorghum bicolor
  unsure (1)..(552): unsure at all n locations
cgtccgctctaaatgatgtcattgctcgccaaataaaaaacccaaatgctgaggaagaatcttccctgtcaaccttgcagaatacctttcttgggcgcaatctcaaacagggaacaaacatatacttaacttggcttgaacccaaaagaatgctgatttccatttccgaaaatcaagatccacgtcaagttgatgcagagatcgaatctgctactgttaattatgctctatacgatggcttctttggtaaatccccagtgtccccttctttgagatcatctacagcccgattgctggaagcgcttctgcagtgacaactcaatcgtggtcccatcatttttttttttgagaaactttccatcagtgattgctaggagtggttatttccctacggattgctttacatttccatcattcaacttgcctagcccaacttgctccgtggaaatggatttttcaggggcagtagaaactattaactgcccttggaaatngattttcaggggtggttattgttgtgaaccacacctagaaaatgtttcacatttttga

SEQ ID NO: 462009 - DNA, 538 bp, Sorghum bicolor
taaatgatgtcattactccccaaataaaaaacccaaatcctgaaaaaaaaggtcgggtgttaaccttgcggaacacctttcttattcccattatcaaacacctaacttacatatactttccgggacctatgtcccaaaagaatgctcactttcatttcctaaaatcaagatccacgtcagactcattctaatataaaaacacctactgtttcttattctctatacaacttctgatttggtaaatccccagagtactcttcttccacagcatacctgttctgatcatggcagtcgcatctgcagggacataccaatcgtggtcccatcattattttttttttgaacaagaatcaaccaaaactaccgtggcaagcatatatacagattactatcaacgtattgctcaaccaaggatccatatgcattcctcccaccggaataaacctaccttctctttttttccccaccaaaaccccccgcgcgggtattactactaatatgcatgcctgtgtgtgtgtgacccgtctatactctatat

SEQ ID NO: 462010 - DNA, 88 bp, Sorghum bicolor
gttgttgttttttttttttttttttttttttactttttctaaatcctaaaccgccactctacattatccagggtgactttttcttacc

SEQ ID NO: 462011 - DNA, 202 bp, Sorghum bicolor
aaaaacgaatacctccttctatcctactacatactatcaaccttaaaaccatattcccagatacaaaaaaaaaatcattaaccaaaacaccgcctcttgctccagactcaacactaacactgcacaaactcccctcccttaaacaaactaactaatcaaactaaaacccttctgtgaaaccaatataacatccaactcttaa

SEQ ID NO: 462012 - DNA, 556 bp, Sorghum bicolor
cgtccgcttatttcttatccatggagactggtgcgctcacctcccactcgctatatagggcaggtgttgctgctgctgcggcgcatgacaagcgccggaggggatgaggagcgaccatcttaccacgccggtgtcatacgttcaccggcaggatccaggctctgccgtcggctgacgtcatcaccaagatcctgtacccgaagctgctgcaccgctcgccctccgacaccggcgacgtattctcgctcgttcaggtcagtgctctcaagctgatcttctacttcatgtacaactgcgtggtgaccgagctgctcatgaagcgccttaaccagcccaaccccgtggacaacaaaacatctgctgctgctgcatccatgagccagtccagcacatcggacggcggccactacgctccacagcagcaacagcaaataccgtctacacgtcaagaagaataagaactggagatcagccatcgcgaatgtatcgtcatcaggtaatatgcacaaccacacgcatggaacctacgaagacgacaacctctaaacacacatcc

SEQ ID NO: 462013 - DNA, 447 bp, Sorghum bicolor
cgtccgttttttttttttttttttttttttttttttttttttttttttttttttttttcgtgggtttttaaaaaagattcttaaaattctaaacaaattctattactaccaaataccaaacaaaggcaaaaaaacccaacttcacaaccatccctaaagttcaaaaacaccacacaatcaacacactgaacaaataaacaccgataaaaccaaaaaaaacacaacccctatacaacctttaaaaccccataaaccaaacaaacccttaaaaaaaaaaaaaatgaaacccccctccaaaacaaccaaacctcctccacacttcctcaaaaaaaaaactaatataaacgcccacccaaaataaaatacaaatcacaaccctcaacaaaaacaaaaaaaacaaaaccctatccaaacccaacaaaaaaaaaatccacacatccccaaaac

SEQ ID NO: 462014 - DNA, 537 bp, Sorghum bicolor
cgtccgcggacgcgtgggaaaaaaaaaaaaaaaaaaaaaaaaaaaaaaaaaaaaaaaaaagaaagatttaaaaaaaaagaaaaaacaaacaaaaaaaaaaaaaaaaaaaaaacaaacgcctccccctctaaaaattctcaatctttcttccccttccttcccccttttttttttttttttatcgccccctaaatccatttcacttcccttttttttccaccctctcttctcccaaaaccttcccttttcccaacttattagcctttcaaaaaatccccctttccccatcttacttactatccataactcccctcccattctcctttcccaacagtttctcctccttaatcactatttgtacccccctttttttgtccttttaaccccattggttgtgtccttacccccaggttaaccctttcactttccatctccttaccccccctttttttcttttttttccctttctttttttaacacgttcccctgttttttcccctttaatttttaaatcccagagtttcttttttgcgttaa

SEQ ID NO: 462015 - DNA, 241 bp, Sorghum bicolor
cgtccgggcgggctccgacccgttctacgcagttatctcgtacaggaacttcaagccagtgggaagccctgagtgacagagcctgtgccagcattgggataatacagtagtacatacaacctataggattactggtgcaaagctagtttgtactcctacatgttacactacagcagcagatcagctgcggacagatgaaagttcagaagctgaaacatcatccatcgaccatctgattcag

SEQ ID NO: 462016 - DNA, 278 bp, Sorghum bicolor
caataacacctaccctcgccgctctttaaaagctgcttctctcctatccactcccctcctccccacaccgctacaacacaacatccccaccacttccttacccctccaaaccttccttcccatgcccccaccaccaactctcctccccttctcacaccccccatccttcctccgcccctacacccgacccccctctccccctactcacgcagactctcaccatcacaccataacgccctccaaccacgacgcaaaccaacaaactttaacccttataa

SEQ ID NO: 462017 - DNA, 164 bp, Sorghum bicolor
  unsure (1)..(164): unsure at all n locations
catattcctttttcttctttcttttatctaaaatctatcctcccccgacgcttttttaatacaactccccctcccacacactatcnattcttacatacatccatcattaactccctcaccatttccttcctctcctctaccaccattattttcccttccacctt

SEQ ID NO: 462018 - DNA, 63 bp, Sorghum bicolor
ccgtccgaaaaaaaaaaaaaaaaaaaaaaaaaaaaacaaactatataaaaaaaaacaaaatta

SEQ ID NO: 462019 - DNA, 451 bp, Sorghum bicolor
aaaaaaaaataaataaaaaaaaataaaaaaaaataaaatataaaaaaacaacacaaataataaaaaaggccagagtttatataacaacatgcatccaaaccaaaataaccccttctttaactacccctctaaattcaacttccctgccccctccttttacaaccctcgttactgactaaaacccttcctattacccaacttaactcccctttcaacacatcttccctttcaccacccttgcctaataccacaataatccctcatccaatccccttccccaacaattacacacccttaatagcaaatcccacccaccctttacccccccttaacctcaaacattctcatcgttactcgcaccattaccgctacactttccttcaccctaccccccgctcctttcactctcttccctccctttatacccacgttcctcccatttccccctctt

SEQ ID NO: 462020 - DNA, 409 bp, Sorghum bicolor
cgtccggtagtttaattaggatgttctttttagcagagacatttatgtgcccatgaggcaagattctactacatgggcagggcatggtcccgtcaatatgttctcatcatgagtaaatggcagcatttatggttaatttcgttgaagattttcagataactatattactctaatgcctcattaggtcattaattgggtgttgaggcatggaaggggctctatcagagcatcaggtcaacatagaacggcaatggaccagctatgtgacttataaatatggtgaaggagaaaacatactgaactctggtcactggtacatctgaaattttgctcaatatgatgctagatagataaaataaacccccctgctgtgtagtggattatcaatctaatatatgatagttgtgtc

SEQ ID NO: 462021 - DNA, 555 bp, Sorghum bicolor
cgtccgcccacgcgtccgagcagttactcgacggaggacgaacagcggctgcccgtctggaggaacacgtcgttcgacaccctcgacgggacgaaaggcgtggggcggctgcatcgactgatggggtacgggtcagctagcgagctgctgcggcactcccctgacctgtacgagagcttcagcgagcggacgacgcctgacgtgagacagcacgacaggaaagggaaaggcgtttgcatcgacgacggagacggcgacgacgactacgacgtcgatgactcggatgaggaagacattggtgcgctgaagagatcagcgaggaaagggtccggttgggcgctcccatggatgcccggcaaggggactccagcagcgggagccatcaggatcaagtaaatagcagcaaaggcttgtgtatattgcaggaataggttcaggttttggaattcgaatgggaattcttcttattatagggatataatagttggactattcattttaggtgcggtattggatttataggctgtttgtttgccattttttgaagcgtgacaa

SEQ ID NO: 462022 - DNA, 453 bp, Sorghum bicolor
ccgtccgcctaccgttcccttttcttcaacgaaagctggaaagaactcgccaacgacatcgagggaggcatgaaaaagatcgctggatcaaagtaaaatgcagatctatagaatgttctcggacaattctttcgacaacactcgttagagcctgctgtctagactccagagtgctactcatatttccacttggaataccacttgtatgtccttgtgtaccaactgcgaggctagtaccatgatggagaataacactggacaccactctgggcatgttttcttaaatgaattgttccaaggattgccaccatgactgcacacggtaatggacactagcatgcctgatagcatgctagcttagctcttctcttacgagagaattagcattagaactcggacgaggaccttttccctgccttgctaaatcactggttccacaactgttaccggctt

SEQ ID NO: 462023 - DNA, 450 bp, Sorghum bicolor
cgtccgaaaaaaaaaaaaaaaaaaaaaaaaaaaaaaaaaaaaaaaaaaaaaaaaaaaataaaaaaaaagaaaaattaaaaaaaggggggccgtcactacacacatacaaactcccagcctccctactcttacataaataaccttttttttattttatagctaaaccaaatccacatttccctgcctaacattttacaaccctctcatttccaaaaaccttccattttccctacttattcaccccattcccattttcttttttccacatatcttaataatttccacactccttacccattcccaattccaaacaaatactcaatcctgaatttaaatattatactttaccctaaaccccacccattaatcccgtcgatttttacatatacccccacccataccctttcccttacctatctcctaatgcttttttttttatttcaccccttc

SEQ ID NO: 462024 - DNA, 556 bp, Sorghum bicolor
cgtccggtagagcttcatgctctggatgctcaaagtctgcatttcttggggcccaaacagacctttctttgggcgacgtctactttcacaatgcccgtgcttcagagagaggtcaacatcatttatcaagcctgggtgggctgcactttcatggaattgatggtgggcctagaaatatgtccctgggaggcttccctggggcttcgtcctcatatggaagaagtggcagcaggcgcagaagggcatccaagctccataagtcatactacgagaacaagtcaccttggttccaagaatcatcagacagggtgccccagctccttctcaccaaccagcaaccgatcaacagccttccccagtggcttacaaaggatgctgaaaccggcaccagtcgaatcaacgctgacatgtggccgagcatggtgccagcaccaggtcgttcagccgcagatccaccgaggggagggttctctctctttgtgacgacgtgaagccccatgtcctccctggagcttccctgaagcgcgcgatgaggaggaatgcggattggcggtcg

SEQ ID NO: 462025 - DNA, 561 bp, Sorghum bicolor
  unsure (1)..(561): unsure at all n locations
cgtccgggagtcgataatggagaagccgacgatggacgccgccgcgggcgccggtgccggcggcggcggatgaggagggatcgggcggaccaagtcggagcagctggcgccgttgcagtcgctgagccggacgccgtcggcggagacggtgctgagcatgccggcggacgccaccagcctgtcgcgcaagcccagcttcgggaggaagcggcgctccgcgtcggtcggcggcggcaacaacaggacccacatccgcaagtcccggagcgcgcagctgaagctcgacgtcgaggacctcgtcagcagcggcgccgcgctcagccgcgcctccagcgccagcctcggcttctccttcaccttcaccggcttcacctcgccgctccagcacatgtgctcccccgacccgccgccgcccttcagcgacgacgacgacagcccgatggacatcgaggccggcacacggcgggaagaagctgatgacngagccgaccttgccgatatacctcaagtttgcggaggtgaagtacagggtggcggngaaaggctcgccgcgggagatcc

SEQ ID NO: 462026 - DNA, 439 bp, Sorghum bicolor
cacccgccccgaaattcccggggggggggactcctcccccaactcgtccggcaaaacacacggctacacatggcccatgataaaatttcccatgggcggaacctgtgggacgccgatcatatttcatactaaaagctaccaaatgaaactgaaatcaaaaactcacgccagagcgctcttgacaacgggcaccatgaactcaactaacgacattatcctggtacatgacacttgaatgatgcaatacactaaagatgttaaatgctaaatgcgctctacacgaccaagctatcggactcgtcttctattgatgaatctactatattggaaaccaaagtgaatcaactggccgagcctttacaactcattgactcataaaacgctggtttgaccctaataaatctcctagcacaacattcgactaacgctatatggcatg

SEQ ID NO: 462027 - DNA, 415 bp, Sorghum bicolor
  unsure (1)..(415): unsure at all n locations
cgttcgggaaaatgcttctgaaaagtagtaaagaagaaactcgccgattagcactgttaccgcttgtttttatataggtgagacctcctatntntntttttacaattattctaaatataacaaactaaacaacattttatccggagcttatatatatttcttatttcagtcgccaaaacaaataaaatacaaaaattttttacaaaatattaatccactcgttttcaaaatttttacaacccaaaataaacattcctcaattttcgcaaaatcaaaaaattattctcatcgtctacaggaagataaaaaaatacttaattttttcaacatctatatacaatcttatttaattttccaaaaaaaaaaaaaaaggccggccttcttacttttacattctactttaaacctcttttat

SEQ ID NO: 462028 - DNA, 390 bp, Sorghum bicolor
cgtccgcccacgcgtccgtaaaaaaaaaaaaaaaaaaaaaaaaaaaacaaaaaaaaaaaaggacggattttttaaaacaaaaaaaaaaaaacaaaaaaaacacaacaaaaataaaaaaaacaaaaaaaacattcctcccgcctcttttttaaaatttataacggcttttttccgctttcccccctatccgttccaaaattagctcatttaacaaaaattttaccccccccttattttcaatcttcttcccttaataaacaccccccttttctcaaaaaacttttctcgaaacccccctatttttatttttctaaaccccctttaaacaacccccctttattcacctttcccccccttgaacccccctttacatcttttaacacgccccct

SEQ ID NO: 462029 - DNA, 484 bp, Sorghum bicolor
cgtccgctttactgatagagaaggacgtaaagcaaccaattgattttttctcataagcaagggatgtcagatcgttgtcatgtatagaaagaaacaatggaagatgatgccctaccgatcagaaggcgaaacatttaatctaacttgaagcaacctggcattagttgagcaaatatactatgcactatgttctctctcctttcttgatagtattagtagcagaaactgtccgcattaggtttcattttttacaaccttcagtatgaaaatttgtccacccaggcggatccagccatggatttgtctaaaattcttctgaagtttctgtccacaaactcttatggaagagagcaaacaattgtagaacagagtagtcattgaggccgagttgaactacattgcatagcacacataagtttggttccagactatttgtaccggcgaccatgccatctaatgtaaattttgggattcggaagaaaaa

SEQ ID NO: 462030 - DNA, 490 bp, Sorghum bicolor
  unsure (1)..(490): unsure at all n locations
cgtccggcctcgcctcacagcaccggttgcgtgttaggagggaggaaggaaggaaggaggggatggtttttttttttaaacgaggcgccaacccanaaanaaaantnntnttacanaacttaattatctttcctcacatgcccctttcccctgctcgcgtgacacctttttttccctctcctatctccctctccaaccgctcttctttctcaattcctaacgttaccccccctttctcctcgcattcaccgccctcctctctcttctttctctcatccttaccaattcacttctcatctccctatctcccgctcctttctttttctatccttactttatgcccactttcttcctcttctcccttctagctttttatctgatccttcctttctatcttcccctttctctttttctcccctttcaccccctcatccttatttcttgcctatctttctcttttttctcccttcactctcctcttcctttttct

SEQ ID NO: 462031 - DNA, 383 bp, Sorghum bicolor
  unsure (1)..(383): unsure at all n locations
gcccacgcgtncgcccacgcgtncgcccacgcgtccggagcgctttgcttggaggtgtatgcggttgggatgatgcttagatcctactggacatatgccgctctgcaagactgcaactgccggtcactgggcagcctgatattccggagcattcggtatttccggcctgaaagccgggcgaagtggtccaatttgatggcccagcacaatctcatcagcttctgcctcctggacaaaccaaccatgctcaccaaagttttgagcgtcctcgggctcaaagcacactgtgacagctggctgtacatccggcacatcgacgtgtcattggagctcaaggtcttggtcttcaaggagctcaaagataaaacggtgggcatcgtgga

SEQ ID NO: 462032 - DNA, 594 bp, Sorghum bicolor
gcgcgtccgcggtaccatgcaagcaaccggctaatcaaaaagagtttactggaaagaagtctgttgatgaggttcaggaaagattcagaacctgcaaatgtgaccaaggaatcaccagtgaaagctgagaaaccaaacattgctcttgtggatgtagtggtcaaggattctccaggtcaaaactagtttatgtgctaccttttatataaagtaaactgaaaattgtctctgggttgaaagagacttcaactcttcaactaatttggcctgatctccttaccttgattggttcctacaggggaaaggcaacagcttaatgatcaagtaacagatgtgattagggaatcttctggtaagatctagaattctatgcttgaagtataactcgcataatgcatgtagtctaagtgctctttctcctggcaggtcaaactcagaatgttgatgtgacaatgtctgatgagatcaagatagcatcaggcgccagagatcagccaaattctgtcaattgtgaccagccaaattctaaggaagcatcaggtgatatatgatcccaatatttcacacgcttaaaaaactggccatgatcttata

SEQ ID NO: 462033 - DNA, 132 bp, Sorghum bicolor
  unsure (1)..(132): unsure at all n locations
cgtccgcttctcttcaagtcccagccacaaggcttggactcttggagggaagaagacaagcggggccgaagaacaaacgccggcggcacgcacccaaaaattgccatcttcaangcgcacactaacaccacc

SEQ ID NO: 462034 - DNA, 272 bp, Sorghum bicolor
  unsure (1)..(272): unsure at all n locations
cgtccgnaaaaaaaaaaaaaaaaaaaaaaaaaaaaaaaataaaaaaaaaaaaaaaaaaaaanngggggtgtttaaataaaaagaagggaaaaaaaaaaaaaaaaaaaaaaaanaaanaaataannnnnnntnnatttaaatttaaataatttttttttgtgggtgaaaaaaaaatttttattttttttaaaagtgaaaagaaaaatattttttgtttttgnttgttttttaaaagaaattaatttttataaaaaaatttttttttttttaaa

SEQ ID NO: 462035 - DNA, 78 bp, Sorghum bicolor
cgtccgaaaaaaaaaaaaaaaaaaaaaaaaaaaaaaaaaaaaaaaaaaaaaaaaaaaaaaaaagggggggggggcctt

SEQ ID NO: 462036 - DNA, 86 bp, Sorghum bicolor
  unsure (1)..(86): unsure at all n locations
cgtccgnaaaaaaaaaaaaaaaaaaaaaaaaaaaaaaaaaaaaaattggcggccactctaaaaaaatccgggcttggttactcata

SEQ ID NO: 462037 - DNA, 601 bp, Sorghum bicolor
  unsure (1)..(601): unsure at all n locations
gcgcgtccggcgacttcgtagcatatttccggaggaggtttctaaggacgctttcgatggcgtcgcaccaccatggcgtcacttacgagctcaacgagggtcgggaaatcatcaccggctacgcagaatgggctcgccgtcatgctggagataaggaacagcttggtgatactgcaacaccagaagcgtctgaaaatcgcgctgccgacccggcacacgcggacatgtttaaacgtgcagccgtcttcacgcagggttactggacgggagcacgtgcggaaacctggttacttgatcttcttgtggtggaccctccgcatcagcgcaagggctttggacgcagcttagttctctatggagtggagctcgccgataaagatggcgtgtgtgccagcatgatcgcttctgaagctggtgacggactntacgcttcctgcggtttcaagggtctaggctggatgcaagaaggagaggggaatcctttgcgcgatgtacctggttggcgaaatctttttccgtgatcctgcgagtgattagatgatcgtcgaacaaagctgaacccactttgtgggatagtatcggtcaatgtgatactccactc

SEQ ID NO: 462038 - DNA, 383 bp, Sorghum bicolor
  unsure (1)..(383): unsure at all n locations
gcgcgtgcggtcaagaccaagggcagcctggcgcagctgccgccgctggaggtgccacgcgtcccngacagcctcggtccgccgtccaacgccgggagcggcgagggcgagttcgaggtgacctacctcgacgacgacacgcgcgtcacccgcggggacaggggcgagctcagggtgttcgtcatcgcgtgaaagctgacctgacctgaactccgacggatctgccggccggcttgtgtgtgagattgccatctttcttcttcttctccggtcgatttttggtttgtgcgtctgagtctgaccatgttctgccattctcttcttcgtgaaactgaatttgcgattagctgatgtgtaatgaaaaattcgtagaattggattgg

SEQ ID NO: 462039 - DNA, 159 bp, Sorghum bicolor
  unsure (1)..(159): unsure at all n locations
cgtacgcccacgcgtccgcccacgcgtncgcccacgcgttcgcccacgcgtccgaaaaaaaagganggttaaaaaaaaaaaaagggggccaaaaaaaaaaaaaaaaaaaaaaaaaaaaaaaaaaaaaaaaaaaaaaaaaaaaaaaaaaaaaaanggggg

SEQ ID NO: 462040 - DNA, 482 bp, Sorghum bicolor
gcgcgtccgattttatttcccatgtatttaaaactatggtcttgaaattttgtatcattcaaacattccgtgatggtattgaattcatgcagctagtgataaaaatgaatcttgatagctacaaaattgcaatgctagtggggtggtggaattggccaacagcgttttatttttagaaaaaaatgattgctattgcaccaaggtgtcgtaaactctcctttttcgtatgatgcatacattgttaggtttacaaaagaaacatcttcctcagcatctgcatacgttatcaatagctattgtcagcagaaagtcgtgaaggttttgttctttttcttatgactgcagcttatagattaactaaattgacattgctgggaaggatgtgattgagagagttggaggctctactgcagtaatttgcattgccttgtcatgctcttgatattaatcagttctttaagtgacatgcagccccaccccca

SEQ ID NO: 462041 - DNA, 270 bp, Sorghum bicolor
caccggttttgcattttggagcgcagcccagctccaaccgttctcatctcaggccatgatcagtatttctcatttacttcagcaaacactagcatgaactcgtctccacagcctgcatttggaatgactaataccaacacagccttcggcatggcttcccctgtaaatgatcagatgaacgaagacagcatggcagatgacactagtcaggcggcacctgcgccagcgcctatatttggttcttcatcatttggacagcagaatatctca

SEQ ID NO: 462042 - DNA, 87 bp, Sorghum bicolor
ctggccgcttcttatgaggatacccaagcttaccctaccccgtgggggtgcgagcgtcattagctgcttcgtatagtcgtcacactt

SEQ ID NO: 462043 - DNA, 272 bp, Sorghum bicolor
  unsure (1)..(272): unsure at all n locations
cgtacaatttggatctcttcttttggaggaattgaaatctacataatggattacactatattgagaggtggcttctaagattgggaaaaaaaaaaaaaaaaaaaaaaaaaaaaaaaaaaaaaaaaaaaaaaaaaaaaaaaaaaaaaaaaaaaaaaagaaaaaaaaagggaattttttataaaaaaaaaaaaattaaaaaangaggggggggggggtatataaaaggtctaatatttaacaaaaaattaaatgaaggggtttttttttttaaa

SEQ ID NO: 462044 - DNA, 382 bp, Sorghum bicolor
  unsure (1)..(382): unsure at all n locations
cgtccagccgccctttttttttttttttttttttttttttttttttttttttttttttttttgtttgtttttttaataaaatggctctccaaataataattnaaaaaaactttataaaaactctttgaaattctcttactaaagttaaaaaaacattttttaacatttttttttttttcaaggcttcactaaaatcaaatttaaaaattcaaagggttcttattttccttaaacaacttcctttttaacttctactttacatttcttaaacatttaaataccattccatccaattgaaccagcactccattttattcaataaccttctttttgatggttttaaggtccactttaaagttttagttccccgttcccttccttt

SEQ ID NO: 462045 - DNA, 173 bp, Sorghum bicolor
acgtacatttttttttttttttttttttttttttttttttttttttttttttttttttttttgttttgtttttttttaaaaattttttttaaaaaaaaaatatattttttttttaattaaataaaaaaaaatttttaaaaaaaaattttttttggaaaaaaatttttttttta

SEQ ID NO: 462046 - DNA, 447 bp, Sorghum bicolor
gcgtccggtgatgaattctgggacactgctccacactatggtggccaaaaagagatttgggatgctctgagagttgccgcagaatctgatttagcccttgcgcaaaccatagtggacagtgctggaatcatcatttccaatcctgacatgacgctttgctacgacgagagaggtgccaagtatgaactgccgaagtatgttttgagcgagccaacaaacttgatccgcgacgggtgaatctggacccccacgagcagggccacgtaaattatgtgaatgttgatttggtcgctgattctgggctgcaactttcagtctttcagagataatgaagcttctttccgcgctgtatagtaatcttatcggacatgctgtagacctgccactgaactcggttatacaggagagtgccgactatggtgcatatacatatgtaatcatcagtcc

SEQ ID NO: 462047 - DNA, 67 bp, Sorghum bicolor
  unsure (1)..(67): unsure at all n locations
aaaaaaaaaaaaaaaaaaaaaaaaaaaaaaatttaaaaaannnnnnnnnnnnnnnggggccctgttt

SEQ ID NO: 462048 - DNA, 112 bp, Sorghum bicolor
  unsure (1)..(112): unsure at all n locations
cgtccgaaaaaaaaaaaaaaaaaaaaaaaaaaaaaaaaaaaaaaaaaaaaaaaaaaaaaaanggggggcctttttatataaaaacaagcttaccaacacaaacataacaaca

SEQ ID NO: 462049 - DNA, 458 bp, Sorghum bicolor
  unsure (1)..(458): unsure at all n locations
cgtccgaaaaaaaaaaaaaaaaaaaaaaaaaaaaaaaaatataaaaaaaaaaaaaaaaaaaaaagggattgttttattttataaaaaaaaggaaaaaaaaaaaaggnntaaaattttataaaattccatattttagtacgcgtgtttggaaagtatttatttttatttattgtgtcttttttttttttaacttgccttttttttccaccctcttatctgataaacccttttccttccccaccttaatttccttcctgaccatccccttttccccccttttctttttaacaaaaagcccctcccctttctccctttccaccaattccccccccttcctgtcaatttgtcctctcccttttgccccccattaaacccccctcctttagttcttccccccaggtttaccattccccttgccattttcctaacccccactcctttgcctttttttctttcct

SEQ ID NO: 462050 - DNA, 245 bp, Sorghum bicolor
  unsure (1)..(245): unsure at all n locations
cgtacacaaccaccctttttttttttttttttagtccatgacaaaacanaancttgtttnttgtttcgtttctatttaaaaattgcgtcgcccctaanaaagaaaaagagaaactantantantantagtattactcctgaataattaatcacatttaggtccagtgctttttttttttaacacgaaacaccctaaaaataaaaactcttttcccagcacccttaaacttccttcttcaaatccc

SEQ ID NO: 462051 - DNA, 283 bp, Sorghum bicolor
  unsure (1)..(283): unsure at all n locations
cacatttttctgattcaacaaactccatctcgatcacactgatccccccggcntgcctgcatatcagtggtgtgcgtcnaccaaaccttggctagcgaccatgctcgtgaggagcgcatccacgccggtcctcggcgcgctgctcccctccggcattcactctcctgcggtgtcctaccacaccgtccactttccctagtcgccggcggcagccgcctaccacccgccgcccatctcctgccacctggccaggcccggatcctgatcctaccactagcgcact

SEQ ID NO: 462052 - DNA, 340 bp, Sorghum bicolor
  unsure (1)..(340): unsure at all n locations
cacctcgccacctcgcaacccccaaccccaaccccaagctattcgggcggttcagcatcgggatcccnacctttaggcctcctgcagctctaccgcgcgacacttatccgcctaattacgtgttcacacgatctttctactcccaagcacgctgccatgaaattcacctacttagacaacgcaggaaccggcgtcagagactctatggccgataagaagcacgtgcttttaaagctcactgacgcatacatcaatcactcatctcattgtgactgtgtgtagagggcaaaattaatctcacgtcaaatggtacttgtgataggagcaaagagcattatac

SEQ ID NO: 462053 - DNA, 478 bp, Sorghum bicolor
gtggctgcaccctggctatgattactgttgatgatgctactactgctgacaatgctgctggtgcttctactcactgtctccacttccttgaacaatgcgccgtcgtgcttcttttgcctcccgctgctccagaaagctaagccgcagatcagaaccaccacagtcaatatcaccaccttcctcttatagattcggaatctcatgataggggctcagcctctgtgcgagtggagagaaagttgcaggcgagctgaagagcaattgcaggtgatatgatgtgctcggctcaagaagcgggcccggagaggaagaagtcgtgccggggctaattattggcaaaacgagctcttgttgtaaacattgatccaactggaatgtcactaatggcgaatcaatattccataaagcatgatggttgctcagaggcaggagaagagcaacgaatacgatcctattaaagataaaaccataaataaca

SEQ ID NO: 462054 - DNA, 405 bp, Sorghum bicolor
gggagggaccgacgcgtacgaaaaaaaaaaaaaaaaaaaaaaaaaaaaaaaaaaaaaaaaaaaaaaaaaaaaaaaaagagaaagagaaaaaaaaaaaaaagggaaaaaaaaaaaaaaaaaaaaaaaaaaaaaaaaaaaaaaaaaaaaaagggggggccctttaaaaaaaaaaaagggaaaaaaaaaaaaaaatttaacgaacaaaattttaaaaaaaagaaacaaaaaaaaaattaaatgggaatgggtataaaaaacagggaaattaaaaaaaacccgggtttacaaaaaaaaaacgctttaaaaaaaaaacccttttcccaaagggggaaaaaaaaaaaaaggccccaaaaaaaggctttcaaaaaaagtggcccaacccaaaaggaaaaaggaacccccctt

SEQ ID NO: 462055 - DNA, 448 bp, Sorghum bicolor
ggcggccgcccagattctttcgattctttcacggccccacacctctctccctctctcgtgctccatcgggcgcgtcctcctcctgcgtgcggcccccatggcctcggcgaacgacgaagatcgcgcggcggcggctggcatcctgcggctactgatggggatggcggcggcggcgcccgcctcggcattgcctcggggcggcggaggtgccggggggcctggcctggtggtggtgcagcacgtcttcctcgacggcgacggggatctgttctcgggcggggtcggcggcggcgtgccgccggcgtcgaaggccgcgatcgccgcgctgaaggaggtgaaggccggggaggtcgagggcgggggcgagctgggcgagtgcgccatctgcctggacggggtggaggacgccggcaaggagatgccgtgcgggcaccgcttccacgggggc

SEQ ID NO: 462056 - DNA, 89 bp, Sorghum bicolor
cgtccgaaaaaaaaaaaaaaaaaaggaaaaaaaaaaaaaaaaaaaaaaaaaaaaaaaaaaaaaaaaggggggcgggtctaaaaagatgg

SEQ ID NO: 462057 - DNA, 415 bp, Sorghum bicolor
cgtccgcacaagcgtcacaggagaaacacaccagaagaacactagctgctacctttgaggatgggggaaccatcagcagctgcttcttcggcagattattaggaagatgattaggagtactagttagaatacctagtaatataactagtgagtgagcgagcgagtaatctagcgaggatcatcgccgtgttcatcgacggtccggcggaggtgccggcggagctaatcccgacgccaagccccacgaccagggccaacaacactgcgtgccagctcctgggtcccttccaggctgccttctagccgcacgtctacgagcaactccaccacctttactaccacactaactaggacatcaaccaggcaatgttgctcccaaggaaagacgaggcgaaagaccaggtctactgtctgc

SEQ ID NO: 462058 - DNA, 614 bp, Sorghum bicolor
cgtccggctggagccattccacaagctcacatgggaacaagttggtcttgttgtcggaaaaggtttggtaggcaatgttctgagtgactacttgtgggcgaaagcgatccttctcacgacaactacggtcgctacagctggcctcacaatccaagttccgattgctgccattgtggacacgctcaccggtcatgctcctcatctactggactatatcggagctgctgctgtcctagtcggttttgctgggatcaacataccagttggagagtctccgcaggttgttcagcaagagcaggaaactccgattgttagcatggttgatgacccggttcatttgcccagcagtaccaatgctactgatgtcgtctcatagttgcttgagaccgtgcgatttatcaacactgtatagaggtggggttggccagatgagtagtttctttgtttttccttaagctgtgccatcaggacaagagatgaacatggacttgaagtagagtaggcctctttagtttgttcagaactttgagtaacaagtgttttgggatcagtattttattttatcttgtaattatttacatctatacaaccagtttcatacagaagagtaaaaa

SEQ ID NO: 462059 - DNA, 654 bp, Sorghum bicolor
  unsure (1)..(654): unsure at all n locations
ccggattcccggtcggccaggcgtccgcccgtcgcgtccatggcgggagcctgcgcggtcgccgtgcccgtggccactccaaccgcgcgcgggcgaggcatcgacgggtgcggctccancttggcgccncgaggaggcagcaacatctcccgccgcgtgaactgccggcgtgatagcccccgcgtgcccgtgcccactaggagccgcgtcgtcacccgtctcgccgggcgcgaccccggggaggccgggaccgacacgggggtggggcaaattctcaagggtgattctggctatctatggacattggtgcttggatcccttggtggcgctgcggtcataaagtacggaagcatcctgctaccggacatcacaaggccgaacatcgtggtagctctgctgatggtgtccctgccggtggtagctgcagtcttgcttttgctcaaagcgagctcggcggactgatacgatacgaggactcctcgaaaccgagaattcgagactactgaagactctttccaatattaataaaatttcggccccatcttgtaagatggaaaagtttgcaactctgttaaatgaaaaaaaaattgaggcctccctcaatgcaagtttcgcagctttagaaatcagaaaaaagattgtccggtgatattg

SEQ ID NO: 462060 - DNA, 408 bp, Sorghum bicolor
ggcgtccgcccacgcgtccgcggtggccaacttcagcggcgtgcaggagccgaacctgtcctcgtcggggatgggtgacatacacgggaggccgttcttcctgtaaaacaccacaccaggaccgctccgcttgtacgcacaaatcactattactgctgcagttcaacaagaatacttaatgatcgccgtatcagaataatcagttatccatcgggttgagctatgatgcttcctagtgtaaaccaagtgtaataatcagttatcctcccttagacttctagtgaacctcagtgtaataattaaggctgtcgttcatggtcctcttatatacgtatatatgtaaaccaagtgctacatgcggcttcagcatgcagtttcagtgatcaaaatgcagtttatgcggcttcc

SEQ ID NO: 462061 - DNA, 273 bp, Sorghum bicolor
  unsure (1)..(273): unsure at all n locations
ccccccatancaaactttctacatctttccaaaattagtcttaatctttctaccaactttaaggaagtgaatttatttttttttaacctttncataataaactaaaccaactctacctcactagatatcctgaaactttattgcccaatatttaccaatctccaacttcttgcttacaccatatttcaaaattaataattataatttgcattatccctctcaaatacatataaaatccttaatattcattcttttccaaacattaattctctt

SEQ ID NO: 462062 - DNA, 691 bp, Sorghum bicolor
cgtccgcaggcataatggttgtcagagggccagcatgttgtcagagggccatcctgtaatgtgattggtagataataatcaacggacgttcaagctagatgcagatgcacaggatgactcttgcacatcatttgaggctcatcaggttggtgttgaaggtggtacacatactgatattgctgatggcagtcactacaggagtgacggctttggtggcggtgcagagcatgggttccttggtgatcattgtgacacaaaagagtgggacttcggtttcagtaccggttgggagaagcatgattttttgtcaacaaacaatgtcatagaagaggtgttcgggaagggctccagtgaagatggaagtgacactgctactggccagggccttctctgagccaggcggaggcttcttttcagctgcgatactgtaacagccctcctggtctctgaatttgtacagcaagtagttggctattttgatttaatgcctcacttgttcttatagggatctctcacccctgtccttggatcatcatctgcttgcgattttgatcgcatgattaatgtaaatccctagatgatatcatctgtcgatgatctgttgttaggctgtaaccatgtacgtattatctttgttgtgacggtgtctcttgacctgagccattttttcatgttccaacgagggtcatgt

SEQ ID NO: 462063 - DNA, 500 bp, Sorghum bicolor
cgtccggccatcactagcgttagcttctgcgtgtggccgtgggcgcctgcctgcttgcgtcggggggggacgaccgggagcggcatcgtcgccgggcatggccttgccctgcgccgcagcctccccctccctaaccctccagggcgagccaccacctctgtctccctctccgcgcgccctgtcactcccgcccgctgcatgattgttccgcctactagcccgtcgccgcggtcgcgccggtgccggtccatctcgtccgagagctccaccgccgcatccgccgcggctgacatcgccaacgaagaagcggatcccgtggacgaggaggaggaggaggaggaggaggaggtggtggacccgcaagcggaggtgtgctacctggaccccgacgcggacccggagtcgatccgggagtgggagctggacttctgctcgcggccgatcctggacgcacctggcaagaaagtgtgggagctcatggtgtgcgacgcgacgctgtc

SEQ ID NO: 462064 - DNA, 124 bp, Sorghum bicolor
ccgcccacgcgtccgaaaaaaaaaaaaaaaaaaaaaaaaaaaaaaaaaaaaaagaaaaggtattaaaaaaagggagaaaaaaaaaaaaaaaaaaaaaaaaaaaaaggggcggcccttttaaaaa

SEQ ID NO: 462065 - DNA, 438 bp, Sorghum bicolor
  unsure (1)..(438): unsure at all n locations
ggggcccacaacgacgcaccacctngctcggagagccgaaacctcctccatgcagggancnggancccngcggggggggctnaaaagcaggacgagcacacaaanaagnnggctcgcactgtaaggtgtgcaaactgcaaacagcagaagggatgtattattggcattctgaagctttcttgtgtttcacagtgaaagcttttctaacttttatatcctgcaccatcagagaaacagtaaattgatagacaataagatgttttttgatctgatgttcagtggcaaacgctttgtattttgcaaccggtgaaggagctgaacctgtggcaactggaagaatcgaccaccgtgcaatgctgttcattttgttttattattaagtcttgttgttagtcattgaatgatgagatcatatacttgatatatctcgaattttgc

SEQ ID NO: 462066 - DNA, 657 bp, Sorghum bicolor
  unsure (1)..(657): unsure at all n locations
cgtccggcgacaagaaagacggcgacaagaaggatggcgacaagaaggacggcgacaagaagaggccggcgccggtcatactggacccgcaccaccagtggtacccgtacgccgccgcgcagtaccacccccacccgtacccgccgcagtacgtcgtccacagcgcctaggaggaccccaactcctgcgtcatctgctgatgatgccgcttcggcttaggcgcagccgcgcgcgcaggctccgtcttctttttgtaaatctctgtgtagttggcctacctcaggccaggcaccatggaccgccacttcgtcggtgatcgccgggaccgggacaggttctggtggttggctgctctgctcgtctctatcatggcgaggggttggtcgctggcccgtccgcaggtcgttatactacgatggctggaggaattatacaggcgatccaggtttccaagagtggttgtttgggggtttcagcangctgatcgatcagcttgattgtgtactgtgcatagaatatatgtgatttttgtccttgctatttgggtgtttgagggatgaaaaagctatatgcatagagatactccgtatctttaaagataaccttgtaatgtaaaatataacttncagaagtctgacgtatggtacgtgtcgagtt

SEQ ID NO: 462067 - DNA, 435 bp, Sorghum bicolor
acaactctgactggaaaacctgcttccactaatcttcacacatccttgccggtggctatagcgaagaggccccaccaccccttcaacattccacctaatcaatgacccccttgcgccataaccgcgtgtgtggtcgccactgccctcctgccacccctaccccctctttcctttcttccttcttttcccactcccgctttccctcaacttaaatcggctccttaggttcatttatcttacgacctgcccaaaaaactattggtgatgtcactatgcctcccctatgacgtttcccctttgacttgatcactctaatatgctctgtcaacgaacacctaactatctgttatctttattataggatttgcgattcgcctatgtaaaaatactgattacaaattaaccgatttacaaaataacctacaattagtgcac

SEQ ID NO: 462068 - DNA, 173 bp, Sorghum bicolor
  unsure (1)..(173): unsure at all n locations
cgatccgttcacnnagttcacaaagggttnnaccccccaccttcgtcccgcgccgccggtgnnngttcgtgtgtagggccggggtcacatgtcacagcgagcagcgcnngtttctcttcttctttcttcttctttcccccggagggnnngatggccgnngtcgccggagccag

SEQ ID NO: 462069 - DNA, 600 bp, Sorghum bicolor
  unsure (1)..(600): unsure at all n locations
cgtccgttcaaatctcaagatgtcattgggacgacatttcccctggatggaggtgatcgacatcatggggtcgtcatgaaagtcatgcgaagatcagtttgaaacagagcatctaaatcgcaaactcacggaagaaattgcaattttgagatttctggctcagatagtgcatgatgcttgacaattttataatggaattttgtttgaaacagagcatttgcagggcaaagaagctattgaccttagtatcatctgtaactccgtcacccttggctccaaaatcaaccacattgaatactgcaccctgcgaggttgctggtggcggctgcgatggctgttgatgacccttcccacagcttgaagtcggcggcagcttgggagtggaatgcctactgccattggcagggcttggaggggcattcgggcttggttggtatggattctgatttcctttaccagcaccagagcttggcgtggagctgaccggtggcttcngacttggccggttgctgccgtgtggccgcgggagctgctcttttttctttgcctttcttgagcttagaggagcctggtgagcttctcgacgaccgccaatgcttg

SEQ ID NO: 462070 - DNA, 71 bp, Sorghum bicolor
  unsure (1)..(71): unsure at all n locations
cgtccgaaaaaaaaaaaaaacaaaaaaaaacaaaaaaataataaaaaaaaaaaaaancgccgcccgatgtg

SEQ ID NO: 462071 - DNA, 163 bp, Sorghum bicolor
  unsure (1)..(163): unsure at all n locations
cgtccgccgacgcgtccgcccacgcgtccgcccacgcgtccgcccacgcgtccgcccacgcgttcgaaaaaaaaaaaaaaaaaaaaaaaaaaaagagaagagtttaaaaaaaaaaaaaaagaggaaaaaaaaaaaaaaaaaaaaaaaaaaaaatnttatttat

SEQ ID NO: 462072 - DNA, 488 bp, Sorghum bicolor
cgtccgccagcagagaggcaaaaggaaaggaaaaggagctcgccaaaggcaccgtgcagctgcacgactcggctacaggattctcagagacaccgctgcaggggcaatggagatggcctcttcctccacggcgccgaccacgtcctactacaactgccgtggcgcaggcggtgttcacgctctccatcaacgccatcctcgtctggctcaccaccgtcatcaagtcctcttcctcctcctcctcctcctcctcctccggccgccgccgcgatgccgcccccgcggcgaccccggcgcctgctagcgccaccgcaccaccaccgtcgccgtcgtcaccggctaagcccgccgccgccgccgtcgacatggacgtggtgctcgggctgatgggcgccggagccagcgcggtgtccgtcgggttcgaggaggcggcggcgctgttcgaggaggaaaaggcgactgtggaagaggcccgcgaggcgttcgcg

SEQ ID NO: 462073 - DNA, 468 bp, Sorghum bicolor
cgtccgccgacgcgtccgcccacgcgtccgaaaaaaatattacaatagattttgaacaagattactgataaattttgaccatgaacaattttggagattttgaggagaaattaatggtcgaaatttgtgcagggcagagagaaaaaatattgtatttataatatcaataaataggtgtaaaataaaataatatgtttcctaaaattttaataatacttatttaatgccatgaagattagcacttataaatatttatatctagatatagtgtatacctaagtgtatagaaaaacatgtatctagaaaaattaaaatatcttataatttggaatagcgggagtgttatggtgtatttggttcgtgccccatacttcataaggtgatacatcatgagtcaattctatgattttggtggaatcaatatattcctcatacatatactatttaatagattatgaggaatgagat

SEQ ID NO: 462074 - DNA, 501 bp, Sorghum bicolor
gaatccccgggtttacccacgcgtccgatggtttccttgtcagtcatacatggggcgagataagaatttatggcgccgtaaacatcataatcttatcaaatgccttgacatccgtctcaagagcgttgtgttgactaattatcgaggtataaggtcacaagttaactttgcaacattctttgtactgaacgcaaagatgctggagtcaatgacatttcggtgtcgaaggtaccttgtgactgatggaattcttgcagagcagcaacggctgctacagctgcagaaaaaggcttcaagatgtgctcggttttattttactactaaaatatgtgagcgcaactttatgcatattaatcatgcccatgatttgtctaaaaccgacccctttgaatgtgaagaaacaaaggttggtgtatgtgcatcctttgagtagttactgcttgattcctttttccagtgttgaagtaagggggttgctaaaaaaaataatattaattatta

SEQ ID NO: 462075 - DNA, 532 bp, Sorghum bicolor
cgtccgcagggtctcaagatgttagccatcttcaagaaccatgaagctgagacaagcatccttgaggacttcgacttctatgagcaacgagagaaagctgtgctgagtagcagacagcaacagaagcaacagtgttccaagactgggaagcaggtcagcaggctcagtgccaccagtgaacaaattgtgactggtattctcggaccgcctttgcagaggctgtccaactggaagaaaccaatgacaaagaagacaaaccaaggattgaagatgctgcagctgctgataacgttcctgctgctcctgtgaagatcgaagaagccatgctgaaaacagcggaagtgggaggcctcttgaaagaaagcgggtgactgctcgttctcctttcatgactaatccagagcagcagctgggtccatttctgatggtatttcagggagagaatgaaggttatgcaaatatcgcatcaggtgcatcttttgtacagcatggtatgctagaggcgtaaaccttgtttcacctttaattaggc

SEQ ID NO: 462076 - DNA, 487 bp, Sorghum bicolor
cgtccgcccacgcgtccgaagtattccaggcctgtacgtttgtgctcagaaatgctttatgaaattagcaatgcattaatgctggaatacaatgatgaatggtcttttattcatatgagcaaaatgtaacataggtgattcactaatatataaatgttgggatgattctcctttatcttcttatagatgttaatgaagaatagacagagagatatactccttagtaacttgtgagattttaggagtagcttttacgactagacttaattgtctaattgtttaggctagacaggtaggtatttgttactgtaagatactggttaatataagtgtctcatcttaaattgataccaacatctccttaatcttacatacatgtgtttgtccaatgcagggagtgtattgggaatggaaaattggatccggatcactttcgccattgattcatcttctcttcttgatggtcttgagaggatcaaatctttct

SEQ ID NO: 462077 - DNA, 519 bp, Sorghum bicolor
cgtccggcgttaagggatcaagttccatgagctcaggaccagatggagtagtgcatgaagattcaatggatcaccatggagatactgattctgacacatgcgacttaggtgtgctggtggatacaaaggcagctttgaatgcaaatatatatgacttagcctggaaggcaaaagatagttggaaggaactcaattgtgaaagatcaagtcaatgatccactgactgaaaagatctctgaacgtagcgaacccacatttacattggatggtggaagagatttgcaggatgatgctagtcatgagttaccacaacaattggaagacaataatgttgccaaaaaggaaaccataccattgcaatctctgctccctttacctgtcccaaaatcaccttcagagtcatggctttctcgcactttgccatctgtgacgaataagccacctttgccatcttttttttgaattcaagtacaatcaaagaaacaagctccctgggtgacaatgcaaccaaaggagaat

SEQ ID NO: 462078 - DNA, 498 bp, Sorghum bicolor
cgtccgggggcaagtacgctctgtatacatcttgccattttggttggtgcttactaagtgttaaccttaggcttagcttgctgcaagaggtttgacccgcggtgccgatgctgaccttgggtaccgctgtcggtttacacgtccacgtcatgggcgggccaggccagtcggtttctttattctcgttgatgtcagcgtaccaacaaaggtgactcgtaaacaacaaccacccctgctagtacatagcgacgtcagtagcagtaaatatttaacgcggaaaggatagtagtaaaaagcaagcagaaggatcgctttcattagagttaattaattcaccgggcgttcttttcactaattgctggtcccttttttgtgacggacaaacgtgcagcatgaaatcgtcgggtggccctggagcaactacggtggcaccgacaggcccgacgccgacgctgtcgggggcgacgccccatatgccgtggtcggcaggtgctgggc

SEQ ID NO: 462079 - DNA, 221 bp, Sorghum bicolor
  unsure (1)..(221): unsure at all n locations
aaaaaacccccanngggaggaaaagaacggaaaccggccgagccccaacannnnagggaggggacgggcccanggggggggggaaccacaccaaacangcggnaaggaggaccaccgaccggcaagcagccaaggggagggacggaggacccaccgggacaccagccggagacnggagacaacaaggccgaaccacgagngaaaaacgagagggggagggg

SEQ ID NO: 462080 - DNA, 386 bp, Sorghum bicolor
  unsure (1)..(386): unsure at all n locations
ccccgtcgaccacgcgtccctggaccatgagggccgtggcggtctcgtcgtcgtcgtcgctgaacccggacgcgccgctcttcatcccggcggcgctgcttcangtgagaaactggtcgccgcataattttacctcatgggcaccacctctcttttcctcaacactgtccctcgagcacgcccacctgtacgagatggccgagcagctcgactcggctggcctgctgcccgacgaagaggaccttttctactactaccagctcgagcaggccccctcctccttctacccatcgcccgccttcatcttactcaagacaggtacggatctacctctctctctcgcttctattctagatttgccttgaagacaaatttcagtgagctca

SEQ ID NO: 462081 - DNA, 580 bp, Sorghum bicolor
  unsure (1)..(580): unsure at all n locations
cgtccgccgacgttggcatatctcttcaggagactgcttgaagacgcggcctcatcacctgccctcactcgccgagctccagatcgacncggggtagaggtgatccacttgggctagatccatccaagggcggcntggtggaagtccccggcctggatccagccaagggcgacgcggaggaggtcgcccgtcttggatccgtccttgcccgcgatgcggaggaggccgcctagcctcgttccggcctctgtctctcatcctcccggaactgctcgctgcagcggaccacctcgcccttaggcagtaatgctcaaaggcttatgttgctgaaccaacaaaagaaggtaaagatccgaacactcctccaagctatagctcatgttctgccgaaatcaacgattcttcgcaatgtccgcctgcagtccacaaagatgtgctgctactgtcgtgggtgttgtgctgntactgggggttgtgttgcttctgcaattatgttccagcaagttgaaatttgagacttaagacttatctgatgtgtaatgaattggtggatggatgtaatggtttaaaatttgatcat

SEQ ID NO: 462082 - DNA, 481 bp, Sorghum bicolor
  unsure (1)..(481): unsure at all n locations
gtcgacccacgcgtccggagaggaaagcgggagcggagagcgcacgccgcccgccccgcccaccggctagaaaagagaggtcctgagaggagaggagtcccaccacctaccgggcgaggcgtgacctcttaaacgccatggatgtctccgtcgtcgtcnntctctctctcgtcgtcgtcgtcgatgggaggctcactcgcgctcgccgccgccacggccgtcgcgttctccggctccctcgtcatcttctcgctctgccgcgcgcacctctcccacgccgccgacccggagccggagactgagacggagctggaggagggcgcgacggagcacgccgccctgcgcccatgcctcttgtcgtcgtcagagaagcggacgctcggtgggaaggcgaaggctaggagactcatgggctaaaggcgggtgcggttcgcggccgacgtcttcgacaattaaggcgcaccgtccgcccgtcgtcacc

SEQ ID NO: 462083 - DNA, 427 bp, Sorghum bicolor
  unsure (1)..(427): unsure at all n locations
cccccggtcnacccacgcgtccnccgacncgtccgcngacacctntaatcnanatcactccatcncaccttttcttcnttatcgccatctatggcttcttcgagttcctctccagcgaggaaggtgtttacaattttgctacgtatccanatcctcnaaattccttctcacatcgctgcttaatcatacaaactatggctggagcactaaaacatgacagattatataacaataatcattgtgcatatcctatacatggaaaattcaggtcctgcatggagtgacaaagcggactatggtattgtctgggcatcaatagctgtgcacacaatacagtcagagatacctgtattttttcaatcataacaagtcacattaacagatctgcttctactgtaatccaatcaccttcttctgtctcttcaac

SEQ ID NO: 462084 - DNA, 385 bp, Sorghum bicolor
  unsure (1)..(385): unsure at all n locations
cgtccgctagatgttcgcttagattttacaccaaaaatctnaagnaacatttancctanctagataccattgacacctatngcgtggagcaaactcaaaggcttctggatggcttcactggctcagcgggggatggcctcatggccaggccgtcttccagaaangtcgcccgcgctcatgaagccgtctgcttgaaattagtgatcgagtcttcgttcgttcactgcttggcttaatataaataagcccatcgacccctgtgtgtgtcctcgttctcgatcggcatgtgtcatccaggtgttgaataagctagctagccgatcgagttgcatgcatgttttcgtgtctttgagaataatattaagctatgtgtttggtataaaaa

SEQ ID NO: 462085 - DNA, 535 bp, Sorghum bicolor
ccgggtcgaccacgcgtccgaagctaagggtctccccaaatgtgaactactcggtttctacattctagtgaggacttcatttatcagagaaccatttctctattttggtctctcgctctatatatatgctctggacacatgagcaaaactctgatctgtcaatatatttgaaggcactctcaatatatgaaactattagcagtttctatagcattgaacatcataccaagaaaccatccttctcagtacaagattttctacagtacacgacataagtggtgatagaaaccatattcgcgctcctaattggctatgagtagtttattatctattgacctagtttcttagttagatctggtttcttggattttctctctctcttcgttaaatctattgccacatcagcaaattatctacgtgatattgtaaatatctatagaaactaccatatagtttctgcattgtgaaatcctaagagaaatataaactacaattaatataccattgggactgccctaattacaaaacattgtac

SEQ ID NO: 462086 - DNA, 120 bp, Sorghum bicolor
cgtccggggaaaaaaaaaaaaaaaaaaaataaaaaaaaaaaaaaaaaaaaaaaaaaaaaaaaaaaaaaaaaggccgtcctttttaaaggacccaaggtgtccgggggctcacattcaaaa

SEQ ID NO: 462087 - DNA, 73 bp, Sorghum bicolor
  unsure (1)..(73): unsure at all n locations
cgtccgtggaaaaaaaaaaaaaaaataaattattntcttnntntttctttttttgtctccccccttctacatc

SEQ ID NO: 462088 - DNA, 453 bp, Sorghum bicolor
cgtccgtcgatgggaacaaacatctcatcaaacgattcatcaaaagaacaaataattcaaccatttgctctacaacttcaactacaactactgctgccatgtctacattatgtaaaacatgatcctatcttcattcatctcattaccttaacattgacgtctatacatgatttatgtacaagagatatttcacagacactattccaaacattaaatttactaataaatatacttattaacatattactaaatttgtctctaaacttatatacaatataatcatcaacatagttaggatccctgttcttaatacaatgctcaatacacttttcagatccctaagtgacattagctcatacatttcatcatttttctcaccaatttttttcacctacataatcatcaacataagcatcaattcatgtgccaatgcatttacaaaaaaaaggctgc

SEQ ID NO: 462089 - DNA, 314 bp, Sorghum bicolor
  unsure (1)..(314): unsure at all n locations
gcaatctggctatgagaccaaagctttttcatcttgactcgcacctgtgccctgacttctctcggatatgctactcgctgggtgaaaatcctcccttacacaaaaactaccaaatgaatagccaccaagtaggctctctggaaatcgctatgccatcgccaggacccatccttatcatctatcgctccaccacctgcccggtccggcacccccttcacgtcactggtgctatcacatacgaccgtcacctggaaccgcctactgggtgcgcctgntacatccccgggtgcataatacccgcactgcacagccta

SEQ ID NO: 462090 - DNA, 264 bp, Sorghum bicolor
  unsure (1)..(264): unsure at all n locations
gtcgacccacgcgtccnaaggaagctagggatgagacacttaaaataaactttttacttcttctataacacaaactcaaatttcttcagtcaatactcatcatcttcaatataggttcaagagatataaataacctgatggcgatatcatcatcttttaaagaattccaactttncaattatctgcangtctatcctaactatattatcatgcttctcatatcatgccacatgaaaaccaccacaatgtctttaattactcttc

SEQ ID NO: 462091 - DNA, 186 bp, Sorghum bicolor
  unsure (1)..(186): unsure at all n locations
atctcccccttttacaacatcttgagtgttctgtttttatttttacaaaactttatcncctctcancacattcccctttcccaacatgtcataatatcataatatacccaacacctatctcccttcccaacattttctcatccttaatgtctaattttactttttcttttttctctcattaatcac

SEQ ID NO: 462092 - DNA, 103 bp, Sorghum bicolor
  unsure (1)..(103): unsure at all n locations
cattctactatagaagaaatctaaccccacaaatccctcatttaaaccaanctaaataaaatattgataatgcaatttaaacaatccaaactaacttcaacac

SEQ ID NO: 462093 - DNA, 284 bp, Sorghum bicolor
cgtccgccttcctcaccgtgggcgcccgaatctacaagctgtccgtagaaggcgacctggccgcgctcgcctccgcgccggcgctcggctccgatcccctagcctcgctcaccgcgcacgtgagccgaggcttcctgctcgtgggccagcccagcacgggccgcatcctccgcgtcgacatggaggacggcgccacgaggaccgtgtcctgccccctcacgccccccacgccgaccgcggtggcggtccggaccgatggggcggaggtggtgggtggggccgaa

SEQ ID NO: 462094 - DNA, 389 bp, Sorghum bicolor
ggaactgtcacgaggggcacctgcgacgaagacccgcgaacgccaaggcacaagatcagccgggtcctaccacagggcggagcagaagcggccactacagaccaacacagcgccgacacagcacagggtgccgacggtactactgcaactgaaactatcatcgatcgatgcatatgcagatgcagatcatgcaatgacatcgaacgaatgcatacatcaactcgatcctatggactgccgacgtcgacgtactatcgtgcgtgtagtaatagagcagactgacggtgtgtgtactactcatactattgcaaaaatactaagccagctttgcagcggtataacatactataggctgtattggatgagcgatcgataatcacatgtgtaaa

SEQ ID NO: 462095 - DNA, 526 bp, Sorghum bicolor
cgtccgatcaacctttaaaataaactcccatcttcagtcagcacgatataatgctgcaggccagtgatcacgtgtgagcagtgaatcaagcgatccaaaatcttctgctagtggtatatatatagtaggtcaccatacatagcagctagtatatatatagctagctaggtacacatatgtttagctatagcttgctacatatatagctgtatacgtacatgatgcatgcatacatacaaaataatgtaggcgaaagatatatctctacatgccaccagtatattgacaaaggttttctcagtatgtgtagacatgatctgaaaggagatagaaacatatacgtagggttttggattttattaggttggctagtaatagtacgtatatatagtagtcgagattgatatgtgaaaaggaaccagctagcatcatgtatttatctccgcgtgtagtattaggctgcttgcctgcaccacccaatgcgtttattagcgttttggggccgaagataaaagttttttttaat

SEQ ID NO: 462096 - DNA, 416 bp, Sorghum bicolor
cgtccgcgaacatctacatcaacccgccggtggcgccgcctctgggcggatacggctacgggggcccgttcttcggcggctacggctacgggtggtcgccgttcagcttcttcgcgcccgggccgagcgtcgccgtcggggtcggcggcggcttcgacacgctcgtcctcttcttggtgctgggcgccgtcgtcggagctgtcaggcggtttctcaacaggaacaacgatgattacgacgactactgattatcaaagctagatgatgtagcgaatgtcatccttcaccttcatgtgtaatatatggcgagattttttttttcgtgtggaatcctaggaacagagtgtactgatgcatcaggaagtgtatgtaataattttgttcagtgaaatgtaatgagaataacatctatagtt

SEQ ID NO: 462097 - DNA, 383 bp, Sorghum bicolor
cgtccgctttttttttttttttttttttttttttttttttttttttttttttttttttttgggtttgggaactcaagcataagaccacttacatgcttatatatcattcttcagggaacacccaaaatattgggccatatactttactatgtatcaaaaatattggtccatatactcgaaggcctaacacaaaaatcacaacaactgtccaatataatatttgattcaaataacaatcttttaattgcctaatatatatacacttttgggtttattattatgtctcattgcatttgactaaatgttgaactccatcacatattacattttgcaaacattctcagtttttccaacttgtaaaacacacttccatcatatatgac

SEQ ID NO: 462098 - DNA, 277 bp, Sorghum bicolor
cgtccgcactccataaacaatattattggaggtttactttggcgctatacaaagaactgacaggagtaaatatgcattatacctttaatagtcatccctgtaagatgttgtactagtttacactttttagtccttagtccttactagtcctgttgccagtattagggttcgatattgcttcatccatatttttcagtagcttatagtatttttttctctcatttttcctacaaccatatggcaaatgaagttaaagatgactacttggctgtggaac

SEQ ID NO: 462099 - DNA, 123 bp, Sorghum bicolor
accgaaaacccaggtcgaccgcacgcgtccggtcgtgtctgattgtaactcttttagacagggtataaatgtagaccccgtagcgatgtaatgcacaatcaatcaaatacaagtctttacatc

SEQ ID NO: 462100 - DNA, 497 bp, Sorghum bicolor
caatatccccggcccacccacacccttccgaaaaaaaaaaaaaaaaaaaaaaaaaaaaaattaaaaaaaaaaaaaaaaaaaaaaaaaaagaaagatttttaaaaaaaaagggcccaccccaaccattctaaaataacccaccctaacttccccccccttcccacaataataactattttctgacctcccttaaactccatttttcttcccccctttttccaccaacaaacctcttaaatcccccacttaacccaacttaatccccctccccctcttcccccctttcctaattaccctaatacctaaaccccccttccctcccccccttacaccactttcccccccttttttcctttttttacaccccctcatccagcccattaatcacaacccttcccctcattactcccaattcacaccccccctttttaacccccttaaccccccctcctttccttttcttccctccctttccccccccctttccccgctttccc

SEQ ID NO: 462101 - DNA, 533 bp, Sorghum bicolor
  unsure (1)..(533): unsure at all n locations
tcggaaaccgcgcggcgggccacgcgtccgccgacccctccgcccacgcgtccgcccactcgtccgtggagcgatttgtctggttagtttcgttacagagctaccntcactccagagcacacccgtgctgccatgacgtggagccgaggccgtgccatcacgggcacggctgctgccgccaccactgcaaaccggagtgcagcagctgccgaggatactgctgcaggcccagagcgcaggagccgtccgcgccgcggaagccaccggcaggcaaggagcccaagcggcgcctgccgccccgcaaccactgccggccggtgctgaagggcgcgccgttcatcgtctgctccagctgcttcaagctggtgcaggtgcccgccgacttcgccgtctcgaccaggacagtgcgcaagcttcggtgcggctcctgctccaccgtcctctcctactcctacagggacccggccaggaagaaggcctaccaggactccgtcgaccagtgcagcatatacggctccgagctgcacggcggc

SEQ ID NO: 462102 - DNA, 368 bp, Sorghum bicolor
ctgttaaaaatcccgcggcgcgacccacgtccccccactcatcctcccacgcttacctcatccatttggctgtcccgtatcccaccacgccgttcctttctatagtggcgcctcatcctaattatttggtgctcttctattccaagcaaacaaattttagatctaggttcacatgctcattgaccagactcctcttcttgatatcaaggacaaccattaatacgatattaatgcctctcatattataagccactcaagaacatcaacctacttgtcctcttccgctgagcataaatttatatcacgccacccaaaaacaaccccaacatcgaaattaccaccctttctgccattccctttatcttttt

SEQ ID NO: 462103 - DNA, 162 bp, Sorghum bicolor
  unsure (1)..(162): unsure at all n locations
cacgcatcccattgctcttgaatacatccatcgtttttctttgccagatgttataacnntcaggaggtctatttcaaaaccagttcttccacatatcctacanaaagtatttctttttctcccatacttacattaattaactcatctagtgcatagagatat

SEQ ID NO: 462104 - DNA, 434 bp, Sorghum bicolor
cgtccgcccacgcgtccgctgagataatcgatccttcactggagtcatacgagaggatggatgcttcagtgcagtcataccgagatgatatagatgtcatcggggtggtcgcgggccttgtgttcttccggaagtggactcatatattcaccattgatcttgaaactatgaagctcaagaggttgcctaaagcggattgcctgggggcgctgatctacccttacacagttgcgtggccaccctctttgtagaatcctgctgaacaagacaagcgcttgatttattggggaactagtcactggaatattactgttagcaccagtattagatgtttttgcagaggatattttggtaaatgatgaatctttgcttttctttttatgaagacttgtgagactttatagcacaatattcgtgtattgtttgttttttct

SEQ ID NO: 462105 - DNA, 642 bp, Sorghum bicolor
cgtccgcaaagcaacaacatgcctggtcttgacaacatcccttctcgtataaagaaaaaaacagcctgttcatacagggagttagaagagaggaagcagcggcttcaaaagcttgagaaattgtatgcagacatggcattgcaaaaagaattgaagaaacctggacgcaagaggaaactgaaactcaatgaagatgaggagacggataatcaaacatcacagcctgtttataagtggcgagcacagaggaagcgatgatatgaatgggtgacagagtaaggaaaaggcaaggcattagtagtggaagcatggtcatagtggcgtacttgctggcgattgatcagctctttttcgatccaaaaagacttacctgcaaaagtagccctccgcaagaactactatggctttgtcaaactgttggagtgttgggaaaaaagaattaggataagatgtaagagtaactttaatttatacaagatcagattctgtatgattcaatcctatgtatcatgtctcaattcattgctctctatgctgttgaattcaccttaggatgggctgttgaattcgacccaacattaacatgtatcatgtaaaactattgaatttgatccaacaccacatgtttaatcccgttgggct

SEQ ID NO: 462106 - DNA, 63 bp, Sorghum bicolor
cgtccgcccaaatccccaatctcacctctcacttcttcatcccaggcagcgacagctgggggg

SEQ ID NO: 462107 - DNA, 271 bp, Sorghum bicolor
cgtccgcggactcgtgggcgcgcacggacgcaggcagttgaagcagcacgatgtggtgggcaggatcaacagaggctcgcgcttcatactggctaaagtctagtttcccggtgagctattcgttaacatggtcgcggtcttttttactgatgttaacaaggttctatgccctcaccagatcgttattttccaacaattaccagtatgaattgtgaatgggacgctccctgtatctgtcattaaatgcagctgttgttgtggttatttttaa

SEQ ID NO: 462108 - DNA, 362 bp, Sorghum bicolor
cgtccgagatgagtacctttatgtgtcaagaattgcagtcttgccatcgttcatgaggaggaaggttggtaccgaactgctgaaggcctgtgagtcacttgggctcaaatggaggcacacatgcatggttctgagggcatatgaggatgacgacggggctcgaggtctctatgccaaggcagggtaccgggtcgtgtcaagggatccagactgtgtcacctgggtagggaggagacggcgtgtcgcgatgataaaagagaaaccggtgccatgggatcggattgggtaatatataacaaaaaagttttcttggttatttggtaatcatataagagtaggaaaacttgtgacttatgattttt

SEQ ID NO: 462109 - DNA, 346 bp, Sorghum bicolor
  unsure (1)..(346): unsure at all n locations
cgtccntaatttacttccccatcttgaacactaaagtcatactctactttcccttccaagcaccaacaacaaagatgggaaattccacttntacaatatattaagatctgctaaattatcattcttctcacacacacaagtacgccatacattctttacctgttaataatcaacatccaaaacacaaagtgcatcaaaacaattctcttcaagactttggcatcaaaatcaatcaacattctacatattctctgtcatagctacaatcatttaactcaccctgtcaatttcacctacaattaaaatttacctgcattctatctctcacaatcacaccaaattccta

SEQ ID NO: 462110 - DNA, 416 bp, Sorghum bicolor
  unsure (1)..(416): unsure at all n locations
cgtccgcggacgcgtgggcgcgccgtgaaccttcactgttgtaggggagcggangcttgggtatatggttttgctagagtcgcggtgtctcttggatcgtgctgtcatgcccaacttcggcctccagcagcaaaccacagtggtccaggacatgttgcagctagccaagttcacctgggcgctctgcgacaagcctcgcccatcctcggcaccagcaaggtcgaaccttgaactatgtcgacgcccttcgtgacgtcgacaaaacccttgtccttctttcttatacctttgtataccggtgatacttgatcagtcatctccgatctcgtttaatgcatgatctgtctctattatatctttgcctgtgccgtgccttcgcgccggtctactctatctcttttggtcgctatggaaaa

SEQ ID NO: 462111 - DNA, 163 bp, Sorghum bicolor
  unsure (1)..(163): unsure at all n locations
ttttttttttttttggagtttttagatttttttgaaaattggtttttntttttnntttttttttttttttttttttttttgtttttttttttnnggnttttgggaagttggtggtttttttttttttatanataaggaaaaaaaaaaaaaagaaatatgtttt

SEQ ID NO: 462112 - DNA, 436 bp, Sorghum bicolor
cgtgcgatcaagaggactttgctgcactacctggtcatggcattgatcaatactcttctggatgggttggggcatgatacctggtgctcgcatggaccatgtccagccacgcgtgattaagcctcaacctttggtccttgctcatggtgaagctcagaaaatgaaaggcaattcatgcaagctttttggaattcaccttgatagcccagccaaatctgaacctttgaaatctccaccaagtgttgccagttttggccctcgaagagggtcagttgttgtcctgactgataggtccagtttgacagttttaggaggtatacttgtgctgagtgcatgcatacacgattctgtacagtccaaaactcggttcgtgttggtaccgtggtcgatcttgttgcaagtaggttcaccaaaaggttgagcaatgtactgttgg

SEQ ID NO: 462113 - DNA, 468 bp, Sorghum bicolor
cgtccgcccacgcgtccgaaaaaaaaaaaaaaaaaaaaaaaaaaaaaaaaaaaaaaaaaaagaaaaaaagaaaaaaaaaaaaaaaaaaaaaaaaaaaaaaaaaaaaaaaaaaaaaaaaaagggccgcccccccaaaaaaacccaacctaccgaccccgcccagcccccgacaaacccctcctttagttccccctaaatccatttccctcccccccttttcccccccccttccctggaaaaccccttcctttccccaccttattccccttgcaacccttccccctttccccacctgccttattaccaaaaagcccccccccatcccccctccccaccattttcccaccctaatattcaattggccccccccctttaccccccctttaacccccccggttttgttgtttcccccccacttaccccttccccttcccacccccctaaccccccctcctttcgctttcttcc

SEQ ID NO: 462114 - DNA, 629 bp, Sorghum bicolor
  unsure (1)..(629): unsure at all n locations
cgtgcgcgtntctggcctctcttcttctttcttttgtcttttgcttccttgagttgccattttctgatagccgggtggcctggctctcggctggcgggtggcggtcaattgttgccagccggcttcttcattgccatatccggttggttcttcatcccattccctgattgccatgcatatctgtagatgcacagctcattcaggcatcctcaattcaattcctgggggaaaaaaaacgaaaaaagacaagacaaaacagggctcaaatttggactgttgtttctgaattgaattccaagactgcacaaaaattgcttgccaaggcccaagggaaagggattctagggagggaggcagaagcttcccggttacaaggacatctttgtatgctcttctgcttgctgctgctggcctggctggctttgtgctggtaaatggatagacgcgtatgaatnggtggaattggaattgactgggtgaagggagatatgctgctgagagtcacacggcatttccaatttcttccctttccccgcagcagccttggcttgtttttccacagtgtcccttgtctgtacctttgcatgcatccccttatacttttacagatatacgcttccatcctcctt

SEQ ID NO: 462115 - DNA, 343 bp, Sorghum bicolor
  unsure (1)..(343): unsure at all n locations
cccggtcgacccacgcgtgcggaaccctattcttgcanactgctttcttcttgttggtgaagtggtaatctgntnntgagagagtaaagattttttcaagttgccatanaaccgagaaatggtgtaatgcttgctggatgttgctgaattgctatgctgccatgattgactaggatgctgctctgctcttatcggggataccttttagatgccatgcttcattgtttggattaattcaatgaatataacctttgacactaaaaattacgcctgcattatctttggttttgttgagtccctgatccagtgatccttgagtttctgtgcaacatagatctatgta

SEQ ID NO: 462116 - DNA, 67 bp, Sorghum bicolor
cggccgaaaaaaaaaaaaaaaaaaaaaaaaaaaaaaaaaaaaaaaaaaaaaaaaaaaaaaaaacaaa

SEQ ID NO: 462117 - DNA, 649 bp, Sorghum bicolor
  unsure (1)..(649): unsure at all n locations
cgtccgcctgatcctgatgttccctcaaatgctaataatctgaaccaggagctgaggtttgatggaagagcccatagcaaacctgatcctgatgatagtactaatgaagttgttccggaatctggaaacaagatggaagtggatagtgaactgacaaacagcgtcacagtcttgaagtatgaacctgaccctgctgattcctcaaatgctattgtcaaacaggatttggtcatcgatgggaagcatggtgaagaacctgatcctgatgatactgcttgtcaagatgttttaaaatctggaaatttgacagaaaggataacagaacagagcagaaactccacagttttgaagtctgaacctgatcctgacgatcatgttgttgattcaaacagcaatgagctgcaaaggattgaagaaccagtggcagccctctgttcacgactccagaagtcaattgagacgctccggttgcaagcgacacctgcagaggcagagtctgctattcatacactctntaaagatatcaagaatgttatagagcatccaaatgatattaagtataagagattgcgtaagtccaacccacatttccaaaggagtgtagcaaactataaagctgcaatggaggttcttgaatngattggtttct

SEQ ID NO: 462118 - DNA, 531 bp, Sorghum bicolor
cgtccgcccacgcgtccgggagctcacatgggattatggtattgattttgatggtgagggcatccgtggaaatcatttgaatgcttgtgtggaagcagatactgccgcggtagaaagcattcgaggaggctaggcaaagctgcttcgaaatgaagcgttggctgaaagcggcagtgcatgttctgggaaagcgaacggactaatcagttttagagtttgttactgttagggtggtggctaagatgtcttgttaacctatgctatgcagctatcaggaggagacctgagcttatgcattgatgaagtggcagtctggtgttgaaggggccggcttgcattatggaatgcataccatgcccgctgtgcttgactgcggaacgtgaaattcaatgagactgatgcataccatgctcgctgtgcttgactgcggaacgtgaaattcaatgagactgactgtagtaggctcccagataatagcggcatctttgcttgtatctatgaaaagattgtcaggttacttgattgtttcgt

SEQ ID NO: 462119 - DNA, 315 bp, Sorghum bicolor
cgtccgcccacgcgtccggatttggttcatgagaatcttcttgtttggcatcgaatgtcggtgcctgataaacacacaagccaggttattcagaactgttacttttgctcaattgtttcctcggttcgagcaaggttactgagctactgtagcaaagaccaattttgatctcaggtttacacgtgatgcttaaagttggcatacccggctttcgtgtgggacaacaggacgtgtcttgaaattgtaaatgctgttgtaagccttgtattatacgagtaaaaacacgctaaatcgcaacgcttcatatttgttgct

SEQ ID NO: 462120 - DNA, 320 bp, Sorghum bicolor
cgtccgatcgatgttaggaaggcaaggaaggagcagctgaagaaagaggaatccatggggcaagtctggcgctattgctattgttgtcggggtcattgcattggctggcctgtacttctacctcaacaatgtctacagctaaacgaagaatcgtgcatgagacccatttggtgccgggaacagaggattcgttccattttgcagttctttttcctttaccactgcaaatgtgttgtcttgctattgctacatatatatactactaggtctcgaagactgtataaaagtcgttgttaatcttgaaatatcacacattactt

SEQ ID NO: 462121 - DNA, 506 bp, Sorghum bicolor
  unsure (1)..(506): unsure at all n locations
tcagatacaagggctattattatggatgaattccttcaacgctacaagtggtgccctgggcaagaagcanagtgtctgaagttagtggaacgcaaagtagtcagacaattcaattcaatcctgtgtgatgagaagcgaaaggttagggtgaaattggttgcatcaaggaaatctaaggaagcgttggatgctgccaggtccaaacagacaaatttggctgggaaagagttgaagcagcagcacagaaatccagcttcagcggggagtgaggatgatgacccattgcagtggaagcctttcccccctgaatggatgcaaccaaagtggtgggaaatgctatgtgagcactgggcttcagaagaagtcctgcaagtctcggcccagaagaggaaaaacagatacacaggaggttgtgcccagcacacggcaggctcgcggagcatagccatgcaccgaaaacttatgataatagaaaatggtggaaagccagtatcagatattgaagt

SEQ ID NO: 462122 - DNA, 166 bp, Sorghum bicolor
cgtccgggaataacattaataagaactagaatatgaatattatggtttcaagtccaaaagggaaaagggaaaaaaaaaaaaaaaaaaaaaaaaaaaaaaaagaaaaaaaaaaaaaaaaaaaacaaaaaaacgaacgcatacatgcaaacatcacacctcttaataa

SEQ ID NO: 462123 - DNA, 641 bp, Sorghum bicolor
  unsure (1)..(641): unsure at all n locations
cgtccgcgcgagacgaccagcgtggctcgtggtccaagaatccctcgtctctctagagtcgcgttgtggggtggagtcgacnagcgagacgatctanttgagggcgcgcgtgcggagggagttgagggcgcgtgggaatagattttgcaaggcagtgggcctcttccccgttggaggcagatccggctcggcacccggcctcccctttggccgcggatccggcgcacctcttttccccatcagcggcggcaatggcgaagcatcagcatcatcctcatccatggctgcatccagcatggagactcgttccctatcagcggcttcactagccacggcttccctatcgaactagcagggaaaaagttaaagaaggaacccatggtgaatttctggacactataaggatgattttgctagttttgttagtaatcagctgatggcatgatgattttgcttgtgaccagtcttttgcttgtcctgttgccttggtatgctcgggctagtgctgttatatgtcttttgggtgtgaacctgtctcctgtgtatgcacaggctattcaaatacttcacaagatacaagttcaaacctatctagcttattctgtttaagtaatgaaatttatggatccaagttctcagtt

SEQ ID NO: 462124 - DNA, 443 bp, Sorghum bicolor
  unsure (1)..(443): unsure at all n locations
cgtccgacacatngnaactgcaagaagnggcggatagaacagcgnggngnactactggagggctagcgtggctgatggcacgtagtactggatgatcgatcgaccgatcaatcagaagaccagaggcgtctgacaagttttgatctagttaattaaccatcaagataggtaaaagattggggaaaaaaatataatgcatgtagtcatgtaaagtgatgtagatataatctgtacatacatatatggataaatatatgcaggctgtaatcaatataggaagtatagtatacaatagcaacttccaggtatgtaataatcctagtatatcacgtgcgtgcaaggaagatagcagcccactcttttttcccaaacaaaaaaaatataaaaaaaacaataaggaaaaatgagaaaataagaaaaaaaaaaaaaaaaaaggggcggcc

SEQ ID NO: 462125 - DNA, 463 bp, Sorghum bicolor
  unsure (1)..(463): unsure at all n locations
cgtccacacacacataccaatgaacataccagcttacatatgaaataccatataaaatggggataatgcttttaatcaacacgatacacaactctatncattaataaatactctaataaacactgtgaataacacccaatattcaatcacaccagcactaacatcattgacggcatcagcaacacgcatagcattacgcatagttgcctggcatattaacgggcaaattaatggggaatctccagtatggtaggcactaccataggcgccaccactaccgcctgaactacaccacgaagcacaccacggaacaccccatcgaactgcccacggacatgaccaccaccaacagcaacaggcacccccacgccaagtgccaggccaaggacgtgcgtcacaccctgccgaacacccagtctacagagcccaccgcctgaacccccaactgatcactgactgcatg

SEQ ID NO: 462126 - DNA, 316 bp, Sorghum bicolor
  unsure (1)..(316): unsure at all n locations
cgtccgcccacgcgtacgtgaatattgaactacatatataaacaccagtgcttgactgaggaaaaaggggaaataaaaaaaaagggaaaaaaannnngggcnncccctctaaaaagaacaaagcttacatacacatgcatacaaacgaaataactgggggtgtagggttacagaaaataaaattaactgcccgtggtggaacaacaatagtgactggaaaaacccacccaaaaccaaactaaaggcccttgaaaaaaatccccttattggaaaaaccgtaatatccaaaaggacaacaccgatcgacctacccaac

SEQ ID NO: 462127 - DNA, 469 bp, Sorghum bicolor
  unsure (1)..(469): unsure at all n locations
cgtgcgcccacgcgtccgcccacgcgtccggctccgncgnggctgncccgngtcccgccgcgcctgggcgngccaggggngcgccgcgnccggagnatngnnngctcttcgattgcaagcaaacaaattttagatctaggttgaggtggagaggggccaggctccgctgcttgatatcaagggcaaggatgaagaggagattggtgcgtttcgtattagaggccagtcaagaacatcaacctacttgtcctcgtccgctgagcatgggggtgtgttccggcgcggcgggccaacgacaacatggaagctgcagctggctccgccataacagcttcagcttagatgtcctccccgggccacactgagctcatcttgtcgaagaaggaagagtctgtgaagaaagagaaatttggatgtatatctctatgggcctgattatttgagtcaaagcaagggattctagatcgct

SEQ ID NO: 462128 - DNA, 514 bp, Sorghum bicolor
gcgcgtccgcatgttttacccttttcttcaatccttgctgctaataaatgccactctcacaaaggaatgagccgtgtttgatgagatgcataataagtgaagggttctaaggtcatttgatctactttattaatctttgtgcaccgagtcgaaattccatatttggattggtgggggtcattcacagcaatattttggcaatgcgttgcggtattaacagtttatacataagatgacatttgtacatttcttgcagttgtcatctttaacatgttagagccgggtaacatctctagagcaatttgtggagatcaaataggcaccttagttgatcagtcaggaaggatcacataaaattaggaggattaatggtagcagagctccaggacatgctgatactctgggggacatcatggattatttgctcttggatcttttccggatagaagagaagcatgttcatcagatgggaagccttcaccttgatttgcctgggatgcctgttatgtactat

SEQ ID NO: 462129 - DNA, 317 bp, Sorghum bicolor
  unsure (1)..(317): unsure at all n locations
atttccaatgcattnaaaatnanccacccaacanagggtccgcttttatataaaaacagcagcatcaccacntccattattacctccatnttatnacacanaaacagtcatcaatcnaccntatatcatcagatgttcaatgtttttcttcaaatgtgtttgatcctactaattaaaaacattctgcaaactatagtgtgaatgggggtgtctcaattaatcataatgggtgcaatttccataattaaactaacactttccccaatattgcaataccaaacatataaagtattaattttaccattatccaaaatatc

SEQ ID NO: 462130 - DNA, 162 bp, Sorghum bicolor
cgtccactcacacttacagacacgcataccattacactataacacaagtacacaacaaaacccgcgccgaacctatcacactatgggccctctcacccacatctctctttgaaatttcttgtccatgacacgtacatctatctatccattaacaacctcatc

SEQ ID NO: 462131 - DNA, 465 bp, Sorghum bicolor
gcgtccggtagcttaagctcatggaaaatatcctggataaacaagatgagcttttttgcaagaagggcgtggcacaaggtgcgtgggtatgttcaatggcctgacaagtctgtttcattaggagttactcaacccttggcatggaaaagatctggtcttatggtgagacccatcatacaagtcagtgtgtgccctacgtttggaggaagtgatcctggggtacgtgcagaagttgtccattcattgaaagaggaattgaatgtgatgtgtggcctctcttgctcacggcatccatcagcttatactgctctctctattggacgatcaaagtggaatggtcaagttggtagttctggagtggtaatcactttggaaacccctcttaataacattgtaaggcccgccttatctgatcaactgaatggtggttttgagttgtgatccttccgagtcgttcactgaagc

SEQ ID NO: 462132 - DNA, 198 bp, Sorghum bicolor
  unsure (1)..(198): unsure at all n locations
ctaacaaaanaatcatgtnttgttatactataaacaaggcgttcactcaaattacattcttannanaatcancttatacacaccgataaaacacccacaaaatctttacgacagatgttttttttttcttacacaaaaacttccaacaacctttcccccattactcacataccagcaccctcttaaccatctcctccc

SEQ ID NO: 462133 - DNA, 262 bp, Sorghum bicolor
tccgcccagcgtccccaaaaaaacacatacatacaacaacatacctattctataacatcacctaaatccaatgcactggtctttaaaaaaacaacgtcataacattaaaaaaccctaaaccttacccaacttaaatcaccttacaacacatacccctttctccccctctcctaataaaccaattttttctcacctatcctcctacaaaacattctttcatttattaatcccaaatttaactcccccttccactcttcataaa

SEQ ID NO: 462134 - DNA, 495 bp, Sorghum bicolor
cgtccgctctaagcatatccatctgactacctgtacaaaaataggtatgaactgcactgtcttgtgaggacttttggaaaggtgcgcatatattctaagtgagtaatatttacgttttgccatgaatatttttcaactctggctgtggttgattgacttcatgatgcaggtagtgtgcacaaaacaaaatccaaactgcagagcttgtcctttcagtggaagttgtatatattacaatagtttacttgccagaaaaccgcttcctcttccagagaagcatgaatatgaacaaggagaacagcaagcaaagatgattgcttctgggagttgcacaccaagttttcaacaaatgtatcagtatcaaattccaataagcagcactactgaaacaccacccatccataactgcgagccaattattgagatgccaccaagcccagaatatgaacacaacagaacacctaacgagcaagaaaattcctacggagattatta

SEQ ID NO: 462135 - DNA, 91 bp, Sorghum bicolor
tctacaactagcacaaccactctcgatctacaactcgtgaaaggggctaataaaaaggtacgcatatataaataaaaaaaaaatatttggc

SEQ ID NO: 462136 - DNA, 399 bp, Sorghum bicolor
taccgtccgaatcccggtcacccagcgtcctgcaccttatctcatccttttctttttgttagaataactcagacctccccatgtgggaagttttttaaccggtttcaaccattctacacattcttatttcctcaatacatttcagtctctaactaccctcatgctgtttgatattaatcacatctagcaaataccatcatccttacatatttcctgacactctcccaaatcttttaactgcgataaatctacacctcttaataccttcccttctcaacttcacgtgttctcatcttaagccaaacaattactgcttcaacacctcacacgtctttttcacatggagagatctactacaactaaaatacattcattacccatattaatgcttttgattct

SEQ ID NO: 462137 - DNA, 223 bp, Sorghum bicolor
  unsure (1)..(223): unsure at all n locations
cgttcgaaaaaccaaacttacatacaacatacatacaacatcataatctcttctataaaatacacctaaagtcaagttacttttcaaaattttacaacaccaaccctacnnacaaccctatccttacccaacttaatcctataacancacatacatctaattccatctcccctaatatccaatattcccactccgaaaacccttcccaacaccaactcaatct

SEQ ID NO: 462138 - DNA, 420 bp, Sorghum bicolor
cctacgccacacatccatgcaaatagattccttaatagatctataaccctccagggtgggtgttttaaaagcgagctgaaacaattcatatctctacctaccaattaaacagaaacatctaaaaacccacctattgggctactggtgtacatctacggctcatactctcaacaaacctacctgcagagctaaacaagcagtctcacaaattgatgcaaatcaaactatacatcccaagccatacattccaaacaaactacctactacactagatgacctgaatggtcattcataggtttacctgcaatctaccatcaaacttaacaaaaatatctccagatctctcatacatcctgacacagttaaagattacattctctacagagtgaacatcattcaaggacacattcacagctgaac

SEQ ID NO: 462139 - DNA, 339 bp, Sorghum bicolor
  unsure (1)..(339): unsure at all n locations
acatccacacacncntnttaactactaaccaacaactaataaacttaacaccaacaaacanaccgaatgtattctaatcttaaacccataccatctancccttttactcccatcccattattctttacccattactctcttacgcctattaactgatcctctactattttttattatactacgatgagaacaactaaaatatcattccatacattatttacttcattcttcagatatcccacattatcacccaagtatccaacaacgtcacataatatagcactattaaccactcctctaacctcactatctcatcttatccttttctatctccccact

SEQ ID NO: 462140 - DNA, 402 bp, Sorghum bicolor
ttttgacggaaagtaatcttctcttgataggattatatacatacatggagatgaaaagctaatacagattaagagaagcaatagaattgaaaaactaaaacggattagaggaatcaaagtaattaggcatgataattttgttttaagcagaatcatatcatcataatgaaagaaagttgattagtccaagataagagcaagtctgcaagtggaaggcggcatcccaccaaacaacataaatttctttctttttccttctgctaacatctgctcgaggtgatcggcaagcgtgattccttcccccaatgcaaggtagcggcagtcatagtgccgccttcaccaatagccaagaactcagtggctgctcagcatggaaagcgcaaccacctgcgcccactgctt

SEQ ID NO: 462141 - DNA, 429 bp, Sorghum bicolor
  unsure (1)..(429): unsure at all n locations
cgtccgcatacactcaaaaccgcgctacagctcattatagatctcttactggattactaacaactacaggtgggatgtaccttcttagctcaggatctnattctctattaagactcttaaatatcaattcatgctccaatactctcatcaattttgaagctataccattgcagacatccaacccattacaattaactctcactcacgatccttcacttgtatttattccatatatggcaagcatcaacgcatacaatatatggtctcatacaacatttcgaacatttacagcgcactatcaacttcataatcgctgctactatagttaacacgaccaagaactttatactagctgaaacgacactcaaattcttatcttgactccatcaactccagcttntacttaaattgaacatcattacaagaccc

SEQ ID NO: 462142 - DNA, 387 bp, Sorghum bicolor
cgtccacctactcctacacatcatcctattctactccatatactgatcaatgcaattcttcacacaaggcctgtgtataaaccgtggcaggccctgattaaaaaccattttgcacactatgttctacagaaatttctagacctataccatgaccagaacctttaatagattcttttccacatcaatgcacactaaaataccccctacagatacactttcgtgaaacatattgagacacttattgacaaactaatacccccaatataaccccccatctgctcctcatacttctgctaagatacacattaacatacatactaacacacatacaatcacacagactatacttttgactaataccactactattacctattgtccgaattc

SEQ ID NO: 462143 - DNA, 414 bp, Sorghum bicolor
gcgcgtccggcgggagactagtgcggagatagccagggccgcctagtcgtccctgtaaaagaaggcagcgggctgtgtcatccggcatggcccccaccgactggagccgttctaggtcttcatcaagtggcgctccatgttcagcattgcggtcttccgaccggtgtctctctgctcttgcatttcaaaacaccttgtcatggcccgcatcggtctactgtcggccagcttctcagtcaacgcgtagaacagcttgctcccgctctattacaaggaactcgtggttactatttccgttgagtaacactataccacctgcactaacacctggacaagcagcccgccattattgccgactctaaatcgtactttacataattggcgctattgctctgctcgtactattttttacct

SEQ ID NO: 462144 - DNA, 356 bp, Sorghum bicolor
aaatattggcctttttttttttttttttttttttttttaattcttattttcttatattatttattacattatttgcttcatgtattacttttttttatcttcaaggacattaactttataaactaccgttaaataatctactctgtatatttgaaaacttccttaattaaagaaattgatgctttattttaaaacctaaattatttacttaaaaatttttttcagaattatagactcatttgctaataaactttttaaaatttttgtattattccattttcccttttttaataattttttattaaaatatttaaatattttttttaccacttgaataatttaccgtttcttattct

SEQ ID NO: 462145 - DNA, 464 bp, Sorghum bicolor
  unsure (1)..(464): unsure at all n locations
gcgcgtacagccaaacctcacaaataaatgatttatatcttattcctatgctctactccctctatctctggggagcgtttaataaacaggctaccatctcaaccaacaccancttttcatcaaattattcccacccttatctattcaagaagatccaaaacctcctccacacaatctttttctccccacataaaatacaacgacaagctaaaactcatccaagattgcaacgcactatcaaactcaacacggcaagaattattattaatttatgcttacgtgtttgaaatcaattaatctctttattttctccaactaaagaagtcatctggagactgctccctgtacacaaagctttatgagactctctcagaggacttgtggacactcaaaatccatcaatttttaaagcaggattctatccgacaagagataggttgatacaatagtagcttttaacaaaa

SEQ ID NO: 462146 - DNA, 215 bp, Sorghum bicolor
ggcgtgcacggaaagagaactttgtgcagagatagtagatgagagactttcagtatttcagcaatattttgccagtttcaaaaaaaagaaaggaaaaaaaaaaaaaaaaaaaaaaaaaaaaaaaaaaaaaaaaaaaaaaaaaaaaaaaaaaaaaaaaaaaaaaaaagagaaaaaaaatatataattaaaaaaaaaaaaataaaaaaaaatcctaa

SEQ ID NO: 462147 - DNA, 421 bp, Sorghum bicolor
  unsure (1)..(421): unsure at all n locations
tcatccaattcataacactcgcaataacnttcaatctcaacttttngatcacgttcaaatctactagataaccaccacaatacttatcaaangatcacttatnatcgaaatatgacttaatcatgggacacaacaaactctgatgctaatcgtatttctaatttgaaaagaacacacacatcttttattcatcatgaccatcacaatcactaacttttcattaccagaattattaccaaagaatgtcttaccaaatcaaattttctataaaaaaaacctctttcacaattatctacttctatttccctcccacttctgatctccaaacaactttcataatgaccacctatctttttcacacttcccattgccatatattcttcacataaacttcattcttacctacaatttcatttttact

SEQ ID NO: 462148 - DNA, 468 bp, Sorghum bicolor
  unsure (1)..(468): unsure at all n locations
ggcgtccagtgaaattaacctccaatttntcattcacaattcagaatctcataanattttnntaanaggggttggtttttatataatgccagagaaaanccaaactntccatcctcatnactcaaacantnctcannntnnatcntatnatatatcactggaaaatgacgtaaattccatctctagttccaagagtacacatcaagagaagcaatcttctaagagcatttcaccatatgtttggtgttcattgacttatgctcaaactgaactccaacctgacaattgtgctaaaattcctctaaaagtgtgcatattcgcaccatttacatacaatttttccaattataagctgcaatataaagtgcatccatcttagggaccacatcttgattaaaatgataaattgttatctcgtacttgtctaaggcatactttctatcttactcttccttcaaaatgtctaat

SEQ ID NO: 462149 - DNA, 361 bp, Sorghum bicolor
  unsure (1)..(361): unsure at all n locations
cgtccgcacacacntacaaaaacatttatctactcctctatcactaaaccgcctagctccttcaatagggagtgcacacaacatagcacagcctcccccttcgtatctaatcctacatcactacactctataatataacattaccaacatcactcatatcccacaattctagatccccttatcttaccaacaaatttctctgcttgtctataaactataacgtttcacgcatgaccacagaccctcaattctcatatccaatcccctgcctaacttaactaatcaccatacttttcaatcacacaattcacttgcattctatttacattactattcgaaaaaaaaacaaaaaaaagagctc

SEQ ID NO: 462150 - DNA, 415 bp, Sorghum bicolor
cgattcccggtcgccgagcgtcccccacccctttcctgtcttcccagcgcgggagcgttctccgccatcaccggcggctgcggaaaaactatgagaggtcaccccccttatctatcccccagagggcatatgtgcagagaagaagcccccctcctctagaggggtatggagacgcaacaaaaggcatgaagcctttgtcccaatatcccattaagcgtcagacggagacttcagttccttttgaaagttgcccttccggatgttacattccaaagactatacttgggagcctcagatttccttttcagtttgttgaccctatatcctctgaacccatatacataatcccaagtttctttgccggagatactttgtcttctctgatccgaaaagccaagaaatcccacaactagat

SEQ ID NO: 462151 - DNA, 420 bp, Sorghum bicolor
  unsure (1)..(420): unsure at all n locations
gcgcgtccacccacccccttctccatgtctctccncaacagcagcagcgattctcccaccatcaccnggcggaggcggaataactatgaggaggtacanccccccttatcntantccccccaagaaggcatattgtggcagaagaagaagcccccctcctcctaggaagaggtatgtattactcaacaaagatggcaatgaaagccttttggtccacaatatcccattaagcgtcagatcggaggagcttcgaattccttttcaaatgtttgaccctctccgggatgtttacattccaaaagactattactctcaggagcctcgaagattttcctttttcgaattattttacccttattattcctcttaaacccagtatcacatcaatccccaaattttctttttccccaaaaatacttt

SEQ ID NO: 462152 - DNA, 479 bp, Sorghum bicolor
cgtccgaaagactgaagaaatgataacggcttggcttgaaggcagagagcttgctaaggcgtgagttggctctaagggtgggtcagtgtctctcaagcttcccaaaaagtaacaagtttaaggttagcccttatgggcaattcataaaataaatgaaacaaggtaggagggcgcttattgttattcctgaagaactgctaaaagttcaaagagatatttttactgcacaggaaatgggtgctactgtatgtttggcctagttgttttccactttattgataagttgaaaattggaattacaatggcaaggcatgtccaacttcaaacatacaagctgcatgtgattttctgtatttattcacatttacattttagtctgcaccctgcagtcctgcactgactacatgctcaattattggcatacaaaacttatcctgaagcatggagggctcatgccttctaaatacttccattaatgt

SEQ ID NO: 462153 - DNA, 446 bp, Sorghum bicolor
  unsure (1)..(446): unsure at all n locations
gcacgcgtccaaatctcttctacaatgattatgtttatgaatatacctatatatccaccatanaaaggggaggaatctataaatagttctatgctatcatataccctcaattacaacaacttttaagtaactccattatataacaactactaaaacaaatgatcatgtaaggagtcttctcattgctattctcgaaaacttgttaacaattataacagatattattactgtacaatatacttgtacacctgcaccaatatcctacttccaaatcactaccatgccatgtgcatcaactgatacccaaactcatatacaatatcaccattcactacatccaactctcatgtgatcctctaaatttatccatacatacacctttgtctgctcacctgcagaccaccatcttatacactactcaatccttggagatacaaaaacttata

SEQ ID NO: 462154 - DNA, 287 bp, Sorghum bicolor
  unsure (1)..(287): unsure at all n locations
acgtccggtccaacaccatataaatgatatccatccccataccagaatcaccacaccacatataggttggttctcttaacaagcaagaacatctcatcnaaccatcnactctaaaatttcctgccaatccttcgattcatctctgatcgatcacacctctctcaaacaagaacctacctctccctacacgtaatctccatgcaggtggagacagtcagcttcaattgctactacctggaaaaacattacacaagctactacatccacatcctaccatcctatttcca

SEQ ID NO: 462155 - DNA, 344 bp, Sorghum bicolor
  unsure (1)..(344): unsure at all n locations
acgtacaaaaaccacccaaaatcacccctctttccttccataaacctctnccctcacnnnatatgaacgttcctattctaaaccctgctcttccccccccaccccccaatcnaatcaactccattctanttaaaaatntatacaataccatatatcgatgtcanaatctaatcttttctttacaanannatnaacaccnnttcatccatntcntcntcttctcttaacccaaactctcctctcttcatcccttcatcatacattcatntttataacttctctccctatttatataaactcttcaataccacctcttaattccnctaccactaattcctcccaca

SEQ ID NO: 462156 - DNA, 577 bp, Sorghum bicolor
  unsure (1)..(577): unsure at all n locations
cgtccgggcgagtcgaggactcgcggcgccaggcgtgccgcgttggcgatgggctgcnggcaggggagttcacaaggacttgcgagcggcaagcnacnggcgtccgcggcggcggcgtgcggcggaagcgggtcctccactcgtcctcgcgtcgacctgatctggcttgcagcgtgcggctgccccaggctgctctgctggctgttccaagctctccatctcccgcactccaggagtacaggtccaggcgtttccctgctcaagtcccaggtccagaactccggacttcagaatccttcatcagcgtcctgctcaagtccagttggtgacgccttctccacatggctaatgagagatttaggtgtccagctacagacttgaaggtggcaatagccgctgaatgtatcaggcagagagttgatgcccacgacggcaagtgggcagctacagaggtgatgaagccgacggccgctgggaacccgcacatgaagctgatgatgaacacatgacggtgtgtgctttatgggaaggcctanaaggatgctgtggattttataatcttgtggtggaagcaggg

SEQ ID NO: 462157 - DNA, 389 bp, Sorghum bicolor
cgtgcgcccacgcgtccgcccacgcgtccggaagaaattccattgagagcttgagagatcataatactgcacgtggcgactagctagacccgtgcaatggaaagggcaccggctctgtgtcttctgaccaccttgttggcattatatttcttggttccctccagtgctgtacctctctcaagagtgcaaaggatgtccatgcaagaggatgatcagataccatcggttgaaagcagcactctagagccaaagataaaaatggagaggtttgtgcaagaggatgatgaatccatggtcaccgcaaggatggccttcgagacacaggactactctcccccggggcccaacaaccaccacaaaccaccgggctggaggtgaacgaggatcac

SEQ ID NO: 462158 - DNA, 485 bp, Sorghum bicolor
ggcgtgcgccgagccatcagcagtgcccgccaccgacagcgataaggcctcgccgagcaacgccaccggggccggagcagcacacccgaaggtgaagaaggagaagagatcagtggacgtggaccggtcgctgccgttcaagaaacggtgcaaggtggtccaggtccagcaggatcacgctgcggccgtcgcagctcctgccgcggccactgacaggccggctgtcgtcgtgcagcaggcggccaccgccgccgaggttggtgacgacgactcctgtccgagcagggacctgcttgtcgaccacattggtgggctcatcagctggagcatgagttcgccggcggctcccgcatctgcagatgctgcctcctgcagtttccaggcgtctcactcgttgcctgtgcagcatgacgagatcacggacgctgccatactgctcatgacgctgtcctgcgggcttgtcctaagctgatcgaccatcgatc

SEQ ID NO: 462159 - DNA, 278 bp, Sorghum bicolor
  unsure (1)..(278): unsure at all n locations
cgtccgccccaacatccacactgccccccactcccagtaaaaactcttctccactcaatgctacatgagccagatcaactcaaaccaacgggtaatagtacaatacatccnactacgtcaaccactccctccccctcaacaaaccatgccaactgtacctggcccaacaagatatctctaatgtcgccaaaaattacgccgcgaacactaacttgccccacatcctgcttcacaacgcctgcaccggcagctaccctactcacctcgacatcctttcc

SEQ ID NO: 462160 - DNA, 391 bp, Sorghum bicolor
  unsure (1)..(391): unsure at all n locations
tcgcaagaaccactgtaccaggtctacctctactnnacacggcggcaanaccttcatgaagtgccccaaactnccnncnacncttatctncccngcntccctcntcttccacccgttctacacctggatgctcaactccanccccaccttctactccaanatcctgctccccactcagaccatgctgaactgattaccggatcgatcggactcgattccacaaacgttagctagccctgttttcaaatccctaacaacttaaattaaatcttcttcttcaaacccgcccgcccaaaaccacaatttgaatcggtcctttttatttgtcccctaaattattaaccattattttattgtatattttttaaaacctcccaaaccgtttttttta

SEQ ID NO: 462161 - DNA, 436 bp, Sorghum bicolor
  unsure (1)..(436): unsure at all n locations
ggcgtccgagatgctgcttgaggaagaggcctaaaggaagggcagacagctgctgaaggactaagtaaggggcctgaacgaaggaattgtgaaatgatctggttgaggaataatgggcgacatggaccaacagacgaagctagccctgggtgtaggtggaattgtagacgggagtttttttgtgtttcagttggttagggttttagttgtagagcagtgttgccccccccccccctcncncccttctctttacatagaacatgtttgctgcactgaaactcagtataatatgtggtcttattggtgccgtaagcttggggttgccagattttagacacgttacccccttatgggggttaggttgttcaaataaagcatggtgatgaatgtgttctcgggtcctcatcagtactggtttgcacatggtgatcaacac

SEQ ID NO: 462162 - DNA, 170 bp, Sorghum bicolor
  unsure (1)..(170): unsure at all n locations
cgtccgataaaaatctcacccaacattcctaactccatcccttacaactactnccacactctcacctgcgaatgtactttttaataatcagaccatctacttctccatttccgccctacatataccaacaaacccaactagcccttccaccaccaaccactacccactct

SEQ ID NO: 462163 - DNA, 435 bp, Sorghum bicolor
cgtccgcccacgcgtcctaaaaaaaaaaaaaaaaaaaaaaaaaaaaaaaaaaaaaaaaaaaaaaggaaagtaaattaaaaaaaaaaaagaaaaaaaaaaaaaaaaaaaaaaaaaaaaaaaaaaaaaaaaaaaaaaaaaaaaaaaggggcggcccttttaaaaaatcaaaatttactttccttttttttaaacttaataatttttttatattgtaacctaaattaaattaattggccgacttttaaaaactttgtaattggaaaaaccttgcctttaccaaattaaatccctttaaaaaaaatcccctttttccaaattggcttaataacaaaaaagccccaactaatctccttttcaaaaaatttccaaacttaaattgcaaatggaaccccccttttacctgccttttaaacccgggggttgtgttgtttaccc

SEQ ID NO: 462164 - DNA, 407 bp, Sorghum bicolor
cgtccgaaatctatcaacttccaccaacacctaccaaggatcatctcatgtagagacactggtggcagtgttctacaaagcaggaggcgtgcaactctgcactcaatgccataaacgcactctaagttgtcctgcagattgcctccttcatctacggtcaatttctcgccattctctttgaaaccctgctcacctctactgttcagacatccgcgatcctgttctcttccgttctatacttcactaaaccattgatacttattcaacttcattcacaaaatcttttactcccaagattacatccacgcctacaactatcccattctcaaatacctctgatattacttattgtttctagtagtcaccattttacacttcaaatgcaccttaggcacctttagaaagca

SEQ ID NO: 462165 - DNA, 422 bp, Sorghum bicolor
cgtccgcccacgcgtccggctgttccgcgccgagctccggcgagcgctcgagttgtaccgcggcgtcgacggctccggctaccggtccccggtccccgggccggtccccggcgaggacgacgcgctctacgaccccttctacgagcactgcgacgccgacggcagcggcgccgagtaccacgccgagatccgagacaagatgctacgcatcatgctcggcgtcggctacgggctcagctacgaggccatccacgacgacggagacaacgagcgagggagtgtcctgctccaggacgccgaacatgacgccgccaggatccaagccagggtccaagacgaccatagcaaggtcaaggccgaggccgatgccgctgctggtgccaacggacgacctaagtgacgacgtgcacacatgccgacgt

SEQ ID NO: 462166 - DNA, 295 bp, Sorghum bicolor
  unsure (1)..(295): unsure at all n locations
cgtacgctcacatcctcacccccttcctatttctctagctccacccctgctcacagcnactgtggctgcgtcatctgagggcgggtcgtcaaccnatgctgagattgcgtccgtggccgcggcagatggcgcggcggcggcactccgctcggttctgtcgcgcgcacaccttcttttgtctctgacgttgctcgctcccacatccgtacgcgtgtcatcagttagcaagactaaaccgatcctccccaacccaaacacatccaactctcttaacatatattcattcaacaacaat

SEQ ID NO: 462167 - DNA, 465 bp, Sorghum bicolor
cgtccgattcattttaatctctgttcatgattacaatcttccatcctttcttcttacatcgggtgagtgtcactggtaagagaaaggcggaatctgaagtcctttccaaatacccagcctcaggtgttgtgttgaggccaggcttcatttacggtaaaaggaaagtaaatggctttgaggtaccgctggacgctgttggacagccattggagaggctgctctcctctgttgaaaatttcaccaaaccattgaactcactgcctgcctctgacctaatccttgcaccccctgtgagcgtggacgatgttgcctatgcagtaatcaacggagtcgtagatgacagcttctttggggtgttcaccattgaacaaatcaaggaagccgcagccaaggtaagagtgtgagccttagggtcttgttccccagtgtatgaaggtattataggtggggaagttcataaaccca

SEQ ID NO: 462168 - DNA, 251 bp, Sorghum bicolor
ttttatttttctatctcccttcccaacaaaaacacagcctgaatttctaatttgacactccctttagcttctcattaatcacggcacttcttgtctttacactcagcataacccttacactttccatctccctaactcccactccctttgctttcttccctttctttctccccctttctccagctttccccctcaatctctaaatcaagatcttcctttatttttcctattaattctttacatcacctcta

SEQ ID NO: 462169 - DNA, 261 bp, Sorghum bicolor
cgtccgccacaatgttcatcaagaggtggctacccgtgttctacgtcccgaccctggtcgtgtttccgctcgccatcacggagaggccagcggcttcagcgctcaagatttttgcaatcacttttggtggctggtttgctaccctcacggttgcaggatatacagtgttagctgtgagaaaccttgtgaaaacagagcttattccagatacagagcctgtgagcaagccgtccccattttctacgtcggaaatcttgtcat

SEQ ID NO: 462170 - DNA, 269 bp, Sorghum bicolor
  unsure (1)..(269): unsure at all n locations
cgtacgtttcaatggtgttgatgctgatgtgtttgcccgatttaaggttttgcantcccgtgctgatgatgtaaactgcttcagtgagattnactgtnnngagccccaagaagcaagcaagagaccatatgcagtcgaagatgatgttatggtgagactgaaagttttgaagtctcgtcctgacaatataacctctttgattcaagaaagcaacaaacaccagctagatgcaagtgcaaacagtgcagataatgttgatgatgctgtta

SEQ ID NO: 462171 - DNA, 423 bp, Sorghum bicolor
gccgcacgcgtccgcaaagctctacaagacctatgagaaaatcaaaaaggaaagctttgctggactcatgggatgagctcttgacacagatgccctctcttcttgatatagatcatccatgtgctcagaagcagatcatggaggcacggaaagttgttgagtcactggaagaagaccctgatgatcctgccccgcagtctaacgcattgggagagagcgaggtttcacagtggaatgtactgcagttcaacacgggaacgactgcgcctttcatcataaagtgtggagcaaattcgagcagtgagcttgtgattaaagctgatctgcgagtccaagagcctaaaagtggcgaggggatccgtgttggtccaagaccaacagttcttggggacttgagttttgagggaataaaaggggtggttg

SEQ ID NO: 462172 - DNA, 405 bp, Sorghum bicolor
  unsure (1)..(405): unsure at all n locations
accggnccnnaatncggcgggtcggccgacgcgtacacaaacactaacaggcctgccccccctccccctctcacacntcgtaccaccaccagggtcatgtncaattatcaagccatggaggcccangcnttcccnatactgttcacgcanggcgtgcgagcctactggcgtcgccncaagtaccaccgcctggcgtatttctccttctgcaccaagccccagtcacagtctctgcatcttttctcggccttcttcctctgctgtgcacttatttctcttcttatttctcttacttttttttattatatattttttttttttttttttttttttgggtgggtgtgggttttttatttattattattctttttatatttttttctatttttcttatatttttttttt

SEQ ID NO: 462173 - DNA, 79 bp, Sorghum bicolor
  unsure (1)..(79): unsure at all n locations
cgtccgaccacacatnctaaaaaaaaaaaataaaaaaaataaaaaaaaaaaaaataanaaaaaaanaaagattatgttt

SEQ ID NO: 462174 - DNA, 436 bp, Sorghum bicolor
cgtccggggttccagattcagttctctagatgatcagatataccgaagacagaatgtgcaaggactagctgaatgaaaaggacattgggcaattttgctgctgatcaacagaaaacgatggctatgtcgtcggagatgtaccagcccatgtcgctaactatacatttcatccaactttagcccccttagttcctcctagtcctagcgacatatttgcttcatttttttttgttcgcttttttggtagttgaaccctggagtgtcaacaaacacaacaacatgttttctttttcttttcttttgctttgcttcttttccttcaagactagaaactttgtaaaaccaactaatgtttgggtaccccagcaaagtcgggacccggtttaagggagtggatgatacattgaatgaattagcttcaagatgatttatatat

SEQ ID NO: 462175 - DNA, 429 bp, Sorghum bicolor
  unsure (1)..(429): unsure at all n locations
ccttattctcacaatatatagatactccaacttcccatcnccccgttcttgtttaatttataaacacacttccccctctctctcttccaaactaacaatttcatcccacaaccacaatagactacttcacaaccttaacaacactaaacctaactttttttcatataaaaactcatcaactactatcccttctttccatttctcctaacttgcaccagttctaactcagacattctgacagcataacttttcttaacataccattcctacancaactcaattacctcgactgttcatatatctccaatcatctccaatcaataccaaccaaagctccaaatctctccactcttaaattcctatgtgacctccgaattcctctctcactttataacacacatccctttaacatattatacacacaccact

SEQ ID NO: 462176 - DNA, 212 bp, Sorghum bicolor
  unsure (1)..(212): unsure at all n locations
gactctccctgtanctgcccattaaagcccgccggtggtggtggtactctcaacgttacctcttccctttgcaaggccctaacccccccttctttccctttcttccctttctttcttcgcaccttccgccgcttttccccgcaaactttaaatatcgggcttcctttaagggtcccatttaagggtttaccggaacttgacccccaaaaact

SEQ ID NO: 462177 - DNA, 65 bp, Sorghum bicolor
  unsure (1)..(65): unsure at all n locations
cgtgcgcccacacntccntcancatcatcanctncagccatgagcacctggccctagagcaccac

SEQ ID NO: 462178 - DNA, 299 bp, Sorghum bicolor
  unsure (1)..(299): unsure at all n locations
cgggcggcaccgcgccctcttctccgtagccgagtcccagcccctcacgcccgcgctcctcnncgccgtgtcggttcgagcccgcttctcggccgatcgacagcgaacgcagccccgcgccgacgagagctttgctttcggttgtgtataacgacgacagcaggaggtagataaaaggcgcgcgatgtgcgacgcggcggtggctactgcagcggcggcgcggtacaggggcgtgcggaagcagccgtagggtcggtttgcggcggagatccaggacccggcgaagcgcgcgcgcgtct

SEQ ID NO: 462179 - DNA, 392 bp, Sorghum bicolor
cgtccgtgcctccgcaggggccgcgccaagtggtgcgccgaggccgccgcgctgctcaccggctggccctcgccaggcgcagctccgacaacgtctcggtcgtcgtcgtcgacctccgccggaggaatcatcactagttggatctgtgcagtcgccagttttagtagtactagtagtacaaggtaggatgatggatggtgcacaaaaggatttcgcgggtgacgggtgtgtactaattgggttttttttcctttctttttcatcaaaaaaaaaaatattttttttgctgtactctccctgaatcaaaaagttcagaggagcacttagattagttattatggtggaaccggaattgatccggatccatttggaatgaaaatgaagtgttgctt

SEQ ID NO: 462180 - DNA, 363 bp, Sorghum bicolor
  unsure (1)..(363): unsure at all n locations
gcggggagcaggatgtaatcggtcagcggctcgttgtgcaattggccgcgaatcaccaggaagccttcttcgaggcgcgcgctgataccgctcaacggcgcgtcnggctcatgggtgctgagcacctggtaggtgccgatggtgtcagcccacgccactggcaacggcggcggttcgatgcgttcaccgatggcaaggcgctggccgtggctacgggcagtgagcatctggcggccttgcacggtgaccacgtccaactgcacgcggcccagttcgccgaggtccttgagccagaagccgaggacttttttctgcgcgcgcagccagccgtgctcatcgcgcaatagttcaaagtggaacccg

SEQ ID NO: 462181 - DNA, 311 bp, Sorghum bicolor
  unsure (1)..(311): unsure at all n locations
cgaattcccgtcgaccgacgcgtgcaaaccccctcatcatcatttttttttctcaaccgcatcactcacaatgggtagacgttaccatctcagaggcactctcatgcgcacacacagccatggtttgtcgctagcacagtanaagcaagaaggtgcgatccgcccagatctggtcgctgccgctcctcctgctccttccagctgctgatccaagcgcgccgtgagcatcgtccaggagcagacaggggaagcgagatctcgagagagggagacaacaaccgtncatggacctcggtttggcggtctttact

SEQ ID NO: 462182 - DNA, 82 bp, Sorghum bicolor
  unsure (1)..(82): unsure at all n locations
cgtgcgntttttttttttttttgntnnttttttttttttttttggngnnnntttttttttttttgggggggggttttttttt

SEQ ID NO: 462183 - DNA, 229 bp, Sorghum bicolor
  unsure (1)..(229): unsure at all n locations
cgtccggttcggcaacagcagcacaagaggtacccgagcgagtcgttagaggcttgcgtgcgtgtagttgtgtatgctagtgctacngcgtacggcgcaacagcagcagcggcagccatgagcaccgggcgcgagagcaccaccagcagcaggtggcccgagctggcgaccctgcgggcgctggcgcgcgacgccgcggagcagctgcagctgccgcgcgtcagcatgt

SEQ ID NO: 462184 - DNA, 419 bp, Sorghum bicolor
  unsure (1)..(419): unsure at all n locations
cgtccgattttcccaacatagggcgttgaggcaaacaacctcttctactagtacaattcacgctgtggttcctcctgagaagttgtatcactcanattttgaaagttgcacatttcagcctgatgcttttcatttttttcttctttcaggacaattctgcacgttgttggatctctcatgaaaaccaccttgaagaaatttttgtgaattcaaattttccagagctaagggagtcagcagatctatcagaagtctctgatcgatgctatggtcttacactagcacctggagaacagatgattgctgtggtccgcagtttggatctgaaccttttgaaccagatgtatcaagtcaggacacaaaaggcggtggttgagttcatctggatcggtggccaatttgttggcattcactagaca

SEQ ID NO: 462185 - DNA, 325 bp, Sorghum bicolor
cgtccgaaaaaaaaaaaaaaaaaaaaaaaaaaaaaaaaaataaaaaaaaaaaaaaaaaaaaacaaccgatgcaggagtgtcaatatcttacatacacctacatccaaacatcataccttttttttactttcacctaaatttaattcacttcccctccttttacaccttctaaccttataaaactcttactttacccaacttaatcaccttccttctcatccccctttccccaaatacccttatatcaaacaaccctaaacccatcccccttcctaacattttcccaaccttaaataaaaatggaacaccccctcctatcttttca

SEQ ID NO: 462186 - DNA, 84 bp, Sorghum bicolor
gcacgcgtccgaaaaaaaaaaaaaaaaaaaaaaaaaaaaaaaaaaaaaaaaaaaaaaaaaaaaaaaaaggaaaaggtaaatatt

SEQ ID NO: 462187 - DNA, 249 bp, Sorghum bicolor
  unsure (1)..(249): unsure at all n locations
ggtgcgcccggccaagccagctgcctcgctcgtgagccacagccaccaccaccaccaccagggcaaagctgaggatggtctcagtgatgagaggctctcncngtcgcctcnccggtgtcggcacgggcagcgcagcagccccgtcggtacgtcgcaggtggcgctagccagctgcagtcatcgttccacggcgtgttggtgcagtgccctgggcgaccacagccggcatgctctgtcacaccgcccctg

SEQ ID NO: 462188 - DNA, 450 bp, Sorghum bicolor
cgtccgcggacgcgtgggcgcaacctggcagcacagatgaaataagttaaagtttattggtgggaatgaattaaaaggttggagtctcttgatcataactgtgcaaaattgacatggtttctctttgatgatcgacaaaaaatgtgcaaattgattttaatcaagaatactatttcatctatccatgatcaaagctatagaaatttgactgccaagaatctgaaaatcatttttatacattttggatttgaggagtattagtactactccctccttcccgtaatacagtgcattcttgcatttaaaacttcttcttaaatataatgcattctaaaaggataaattccattttgcattaaatactttccatttatcaacccatcaccattaattattttgattaaacctcttcttaaatattattcattctaaaagattaaattccatttt

SEQ ID NO: 462189 - DNA, 393 bp, Sorghum bicolor
cgtccgctttttcaattcaaatacaggcatgtttgtctactcttttcagatcgaaatacaaggagcgcgtcaacccttttacatttatatcttatcattttatacttagattcttatttagagtacttggagaagaggggtctatttagattaggatatgattcttatggaagaaagtgtctacatcaaggatggttgtctctgcctaccgtaagataagatcaaggccaccaccgctaaatatagataatgagatggacaaaacttagaaatcgacaatgatcctgttgcaacgtacgagcacttttgctagtatatatatagaggaccctactatttagcatcctggcttataaaaactgagtaatatttgagcgcaccgtcgtgatacca

SEQ ID NO: 462190 - DNA, 83 bp, Sorghum bicolor
cggaattcccaatcgacccacgcgtccaatatcaccacacatcacgcacttcgcgccgcaacataccactcacacatccatcc

SEQ ID NO: 462191 - DNA, 356 bp, Sorghum bicolor
  unsure (1)..(356): unsure at all n locations
cgacccacgcgtgcggcaaacaacaacttttcattntcttcctaatcacattcctcaccacctctaccatnnacaaggtccagatgactctataaaaaagactagccccacaccacctattcancctttatccccagccacaccccttcccttccttctagccaaccatacactggcccaacatacacataaatccacccctataaacacacctcttctaataacccttacccctccttcataactccataaccaccatcatcatgcttatccttattagatatattccttaaaattttttttctctcacaatccaattattctgaaaaatattcaccactacatttttcataaac

SEQ ID NO: 462192 - DNA, 664 bp, Sorghum bicolor
ttttgtctctaggcgtatttttcctagatatcgaacgttcttcatcttactatttattaaccataatcagatcttgttaaaaaaatacttgttccttgacatttgaaacaaaccttccaagtacttcaaggacttaaatactctttaatagacgaaaatcaaaggatttcgaattttggcagtaacatcatgttggagccattccatttgaattggcactttctccatcatgactcatgggaagagacattggcaataattcaccttggacaatttatttgtgaaaatttatgtctatttaaatcacacataaaaaaatctggtcaaattttcattgttaatatggactcctttgttctaagagcagctaagccttatttggccactataggagcaactgttcatggtcattatggaaaaatcctttacaaaggagataggttagttacttttatatatgaaaaatcgagatccagtgatataacgcaaggtcttccaaaagtagaacaaatcttcgaagcgcgttcaattgattcactatcgccgaatctcgaaaggagaattgaggattggaatgaacgtataccaaagattcttggggttcccttgggattcttgattggagctgagctaaccatagcccaaagtcgtatctctttggtta

SEQ ID NO: 462193 - DNA, 599 bp, Sorghum bicolor
  unsure (1)..(599): unsure at all n locations
tggacgccaagtgattgatattatacctcccnntccaggacttgtnttggagaaggggaatcaatcaagcttgatcaaccattaacaagcaatcctaatgtaggagggtttggtcagggggatgcagaaatagtgcttcaggatccattgcgcgtccaaggccttttgttcttcttctcatctgttggggggtgggaagtttttttggttctcaaaaagaaacagtttgaaaaggttcaattgtacgaaatgaatttctagatcctgggatttcttaccatcaagttagaaaaaagcctcgatttctggaattccttatttctatctcatgcaaaagaagaggatccaaggcaaagacgagaacaataaaagcaacaagtccttttaggaggaattgtgggtcttcttaatcctctattgggcacaagaaaaaggcaaaaaagcctttttcttgtgtcgattcttcttgtatcgaagtaagaatcatttttcttcttatttgttttgtcaaagattactatttattctttattcaggtctgtcttttggacttcctttgcttaggttcgggcgcggtagtggacaaacagagggaaaga

SEQ ID NO: 462194 - DNA, 654 bp, Sorghum bicolor
  unsure (1)..(654): unsure at all n locations
ctatttcaatcggaactttccgcgtcgatttttttttattacntctggtttgtactgtatattgaaagttactctacgtattgcttgacgtaaaaccaatagtggatttgtttctgtcttttgttgaatctttttcacggctcgatagagaatttgataagccaatgatttttttccgtctttcataatancgggggggggggcgatgttaactaatcgattacgaaaaattggatcggattttgcggttcttttttctgcagtacctcgacgtgacatgagcgtgaaagaggttcaagaatccgttttctttttataagggctaaaaacgaatcacttatttttttggctttttggccccatattgtagggtggatctcgaaagataggaaagatctccctccaagccgtacatacgactttcatcgaatacggctttccacagaattctatagggatctatgagatcgagtatggaattctgtttactcactttaaattgagtatccgnttccctccttttcccgctaggaccggaaatcctgtattttccatatccatacgatcgagtccttaggtttccgaaatagtggaatggaaaaagaagtgcttcgaatcattgctatttgactcggacctggtctgaaaaagtcg

SEQ ID NO: 462195 - DNA, 659 bp, Sorghum bicolor
aacgcttgatattcattctttttttctaatttgaattagaaatttcagttgctatgattctatcttctccttagtgaactatttatccttaaattattaacaaataaaaaaaacaaaatatctcaaaaatgtatataatgatcaaatgaaaatgccaatctcttggcattttctctttattatattatgcatatatatgggtcttttctatgtattagattattcgtccgagccatatcaaattgaaaatatctgaaatcaaattcaatatagaatttggaatagattctattagaaaaatccatttgcgaattagagaaataaaaagaaagttcaataaattctataatcctatttaagaatatcattttagttaagcatatcaagctaactttatctttatgaaattctagtattttttttctaagtggaacttccaatttagaactagttaataactaagattaataattaagatctgatattttacagattccctatatatatttttatttgttacactatttctgttatgtaagcccacttagctcagaggttagagcatcgcatttgtaatgcgagggtcatcggttcaaatccgatagtcggcttttttttctatcgatgttccatgaacaagaatttctttttttctccga

SEQ ID NO: 462196 - DNA, 666 bp, Sorghum bicolor
agcctcaaagaaaacgtagttctgggggggattattcttgttggtaccggatggggaggggggtgcatcgttccccacaagacaagaacctttatttcgaaattaaaaaaaaaaatctattcgcgtcggaaatgagagatattttgtttctccatacagaattagtttcttctgattctgacgtaacaaacaatttctatggggcgtggagaccccgtttacccctatttatacgatttaagtatacataaagcaatttttttttacttaaatttaaactatacttttgaccttagaatgctaacaggtctgattttcgattttgtatttgaatttgaattgtatttgaattgtatttgaataagtaaaagaagtcagttaattcattaaggctatgtttataccgtgtatcaatggtcaattatgagtagaaggttccatcggaacaattattatttatttcaagctatttcggctctttcttaatcttcaaaaagaaattaattccgtaatggtaagacgaaaaaagaaaaaataaaaaggaagtgtggaaaaaatgacaagaagatattggaacatcaatttgaaagagatgatagaagcgggagttcattttggtcatggtattaagaaatgggatcccaaaatgggcccttacatctcggc

SEQ ID NO: 462197 - DNA, 388 bp, Sorghum bicolor
  unsure (1)..(388): unsure at all n locations
cttgcaannngaataaacctttanctnaccatgactgggggggggggagaacaaaatacaancctgtgggggcgcttctgcaactggataactagcaccgaaaaccgtctttacattggatggttcggtgttttgatgatccctaccttattgaccgcaacttccgnatttattatctcctggagggtggggcctccantanatattnatnntattcataaacctntttctnnttctttactttatnnaaacaatattatctctnntcctattattcctacttctncnncnatcnnattncatttttacccaatttnnnaanctncatctnttnataaatnnttatacaatnncnntccttatnaaccaattnttctacacttcttac

SEQ ID NO: 462198 - DNA, 614 bp, Sorghum bicolor
caaaacattctagtaatggaattccatatcgcgaattttttattcttgcccgctggaggggtgatgactaattaaacaatctcaaccttggggtaaagagtttacactgcttatgtttactttaacttttttcttgtacgtaggaaatgagattttttatttttactacaaattaataagctgttttgtttcactcatataggggggggggtttaacttaccaacgcgaatacagaataagcaaaggaagataagcattcaatgtattttagaggaaaaagatcctattttaacgaatcacacgtagagatattgctagtacacaaaaagttaatggtatttcataactaatagattgagcagccgctcgtagaccgcctgaaaaagaatatttattatttgagctatatcctgccatgagaagaccaataggagcaatacttgaaatcgcaatccataaaaaaacaccaatactaagatcagctaaaacaaaacgatatcccaaagggataactaaaaaacttaataaaacggatatgactgctatagagggaccaatgctaaataaaggaatctctcctccggatgggaggatatcctcttttaaaagtagt

SEQ ID NO: 462199 - DNA, 426 bp, Sorghum bicolor
  unsure (1)..(426): unsure at all n locations
taaatattctttttcaagccgtctacgagcgtctgctcaatctattagttatgaaataccattaactttttgtgtactagcaatatctctacgtgtgattcgttaaaataggatctttttcctctattttcattgaataagtatgttcctttncttattctttattcacataaataaattaaactcnatanctatatnantnaaacaaaacancttattaatttntantaaaaataaaaaatctcatttcctacctacaanaaaaaanttaaantaaacataaccantntaaactctttaccccaannttnaaattntttaattantcatcatatcttnaacccnccaaaaataaanaattcccnatatnnaattccattactanaatattttnaattattactataatttaaacttataaccata

SEQ ID NO: 462200 - DNA, 272 bp, Sorghum bicolor
  unsure (1)..(272): unsure at all n locations
aggccacgggcgggaganaagcggacncgaaccgccgacaaccgccacagggnaaaccaggggggggcaggccgccccgacgggcgcnaccagagaggacaacgcaaggcaanaacgcccccccgaacacangccacaacnnncaacggacggggcgcnccaaagagcaacnggncgcaaaaccccaaaacaaaaggggccgagggggaancccagnccaagganncgnggggncccggggaacccagcnacaggagaaccaggaacgggga

SEQ ID NO: 462201 - DNA, 550 bp, Sorghum bicolor
  unsure (1)..(550): unsure at all n locations
ctctgctggtcctgcagcagnaccttttttaactccgggcccaatggaagggagccctacagccaatccagcagcaataacggaagcagcagcaattagtggattcatggtgagttcctcgtgtcaaaaaaaaaagaaatggttaaggatacaatcaaccaagaaattattacttccaacttctaagctctatcgggtggaggtaactaataagtacaaataaatgataatcgaaatcgttcgaattacttcgagatctcgtttttagtttctaatcattagaggtttgtgtaaatccatatgattctcattattctatttctctttcttttcaaccaatcactcttttattccatccttttttttactctgaagaaccccttttgaaatcgaactaatccaaatccaataggaatcaaatcaagatatacaattgataacaatatgctgcatagaacttgatatggaatccagttccatatagaagggaattctatatatcggattagataatgaatttaacttaggaataaaaaaaatcccatataca

SEQ ID NO: 462202 - DNA, 603 bp, Sorghum bicolor
  unsure (1)..(603): unsure at all n locations
aggaaataatacaatnggccaaaatagattatgaggatcatctccaggtcatggggcatttctcaacaaatataatctgtttggctattctaagtggttctttttttctgggtaaagaagaacttgtcattttgaattcttgggttcaggaatttttctataacttaaatgattcaataaaagctttttttattctgggggttactgatttttttgttggatttcactccacccgcggttgggaactactaattcgttgggtctacaacaatcttggatgggctcctaacgagctaattttcactatttttgtttgtagttttcctgtgattctagacacgtgtttgaaattttgggtctttttttgtttaaaccgtctatctccttcacttgtagtcatttatcattcaattagtgaagcataaactcactcatttgatttcctaatattaatcaaattagcatatttcttcctttagaaagaaagcccttttcctttttaacaaaattctttctatttctacctgctcaaggtattcatcattctagtacaactattgccgtagaatgaccaccgactcgtgtatagggaactagattagc

SEQ ID NO: 462203 - DNA, 649 bp, Sorghum bicolor
acctggggaattaataggactattgcgattttaacgagcagggcggggttgagatgaatcgatctattatcgggcaatcttatggggaataacaagggcttccctgaataccttctgccacaaagaacggttgtgataagaaccgctcgatttttcgtgctcttgctacagttaaacgatcctcctccgataattgggggggtgcaagaattgcgataatgtcctgaagttctttgtaacgttgtaaagtttccttaactctttgcgcagtttcataatgttcgttgccaacgatccgaggctgtaacatagttgaggttgaatctaaaggatctactgcgggataaatacccttggaagctaatcctctggaaagtacggtagtagcgtccaaatgtgcaaatgttgtggcaggagcagggtcggtcaaatcgtctgcaggtacataaactgcttggatcgaagttatagatccctttttggtagaagtaattctttcttgcaaagaacccatttctgtactaagggtaggttgataacccactgcggagggcattcttcctaataaggcggatacttccgatcctgcttgacaaaacgaaagatattatcgatgaataaaagcacgtcttgcttattaacatctcgg

SEQ ID NO: 462204 - DNA, 629 bp, Sorghum bicolor
  unsure (1)..(629): unsure at all n locations
gtacagtatttcatcatttctgttgatggaagattatctttgacttctcaatggctaatgatcaagtaagccatagactgttggatacttttggtaaaaaagatagggaaattcttgattatttaacgccagatcgaatcgtgtccaacggtcattggaattgtttctatccttctattcttcaagataattcggatttgttggcgaaaaagcgaagaaataggtttgccgttccattacaatatcatcaagaacaagaaaaagagcgaatatcctgtttgggtatttcaatggaaataccctttatgggtgttttacgtagaaatactatttttgcttattttgacgatccacgatacagaaaagataaaaggggttcaggaattgttaaatttagatataggaccctagaggaagaatatcggacccgagaggaagagtataggactcgagaggaagactcagaagacgaatatgagagcccagagaacaaatataggacccgagagggagagggcgaatatgaaatcctagaagacgaatataggactctagaggacgaatatgaaaccctagnaagatgagtatgggatcctagaggacgaatataggactctagagaaagactc

SEQ ID NO: 462205 - DNA, 642 bp, Sorghum bicolor
cagaaaactcaaaagagaaagaagtctctttaatctcttcatgctcgttccaagttcgaagtaccgtttggccaaagaaaaagccgcttcctgacacgattgcctctttatatagatagatataggatctatggggttattacttagaagtctattttgtacaagatcccctcctatctgatagaaaagggtcccatgatcccgagccggtcttatcttggctcgcaaaccccaagtttgtctatgaagagctaatctaattgtattagtttctataatggatttcttatgtggaatactaatggatagggcctcgttgctaagtgctacaagatctagtgcactggaactcgtggttatggacccgaatcctttagtatggaacattgtcttttccaagtaaaaacccctagtatatgaaagaatgaaaaggtgctttcgttcttgtggaataagaagccctcgtaccttaatgaaaggaaaataggaatttttcgttaggtatttgaccaaataggatcgtccagttcctatagaacctatcactaaaatacccgatagggctaagcggaacgaaaagggttttccatgagatggtaaatgaaaacgattagccccacacgaggtttgggaatagtgatt

SEQ ID NO: 462206 - DNA, 666 bp, Sorghum bicolor
catcatgagggaatccataaaaataattcaacaggctgtagagaaaattcctggaggaccttatgagaatttagaagcccgacgctttaagaaagcaaagaatcccgaatggaatgattttgaatatcgatttcttggtaaaaaaccgtcgcccaattttgaattatcaaagcaagagctttatgtaagagtagaagctccaaaaggcgagggaggaatttatctggtaggagatgatagtcttttcccctggagatggaaaattcgtccaccgggttttattaatttgcaaattcttcctcagctagttaaaaaaatgaaattggctgatatcatgacaatattaggtagtatagatatcattatgggggaagttgatcgttgaaatgataatagatagggtagaggtagaaactatcaattctttttcgaaatcggaattattaaaagaaatctacggacttatatggattctacccattttggccctcctactgggaatcacaatagaagtactcgtaattgtgtggttagaaagagaaatatccgcatcgatacaacaacgtattggtcctgaatatgctggccccctgggactgcttcaagctatagcagatggaactaaactacttttaaaagaggatatcctcccatcccgaggagaga

SEQ ID NO: 462207 - DNA, 384 bp, Sorghum bicolor
  unsure (1)..(384): unsure at all n locations
atactcatcacttgatctacccagctccagagtttcacaatcacactgtacaatggccatggctcctagatcgttataggcaacaactcatcttagaaccggtcttgagagttatctacgctaagcggggtgacaaagtgacttcttcaacgactctatcantacgtgagatcgatttctgcccaagcaatccaatgtcgaggggggacgagcacaataagaagatgacctaggtttcaaaccctaatcatgatcaataatcagatagatctttatttccacctcgagcagacagactcattattagccctatatcctttgttagattcaacggaatggttactatctagagccaaagatcgtcatatttgaacgagctctcga

SEQ ID NO: 462208 - DNA, 456 bp, Sorghum bicolor
aaatcagctaaccgatcaataagctgtactgaataggggctacgcagtaagattacctgttccctctgtttacgcgcatgcccatctccttcgtatgcggctgatcctgctccataccgcatacaaacgacagctactgaggcaataaaagaaacacctgtttcactactccctagtacagaaagggtataaccgatacataacacccagtataggcgttatggtcatacgtctcttatgcatgagtatgccccataatatgccccatgctcctaccctattctgatacgcaactgttattcacagctcctaccgtaccaccccttatgagcccgacccaatgcttactgcttgtactagtgcatccagatccgacagttagagcatctagattctatggccatatacacacactccatgctgtgcacactgcccattacatgccatcatcgcacg

SEQ ID NO: 462209 - DNA, 581 bp, Sorghum bicolor
  unsure (1)..(581): unsure at all n locations
tttttgngttactttagtagattttactttgtttatcctttagttcaagggtggttgaatttcgctgtattctgtaatgtaaatagaacgaaatttattgtgtaaaatgaaatttcaataaaataaaaaaggagtcttcatgtcccgttatcgagggcctcgtttaaaaaaaatacgccgtctgggagctttaccagggctcactagaaaaacgcctaaatccggaagtaatcagaaaaagaaattccattctgggaaaaaagagcaatatcgtattcgtcttcaagaaaaacagaaattgcgttttcattatggtctgacagaacgacaattacttagatatgtacatatcgctggaaaagcgaaaagatccacaggtcaggttttactacaattacttgaaatgcgtttggataatatcctttttcgattgggtatggcttcaaccattcctggggcccgacaattagttaaccatagacatattttagttaatggtcgtatagttggtataccaagctttcgttgcaaaccccgagatattattacttccaaggataaccaacgatcaaaacgtttgg

SEQ ID NO: 462210 - DNA, 555 bp, Sorghum bicolor
  unsure (1)..(555): unsure at all n locations
gcttccatttcctacaaaacaaaagaagatttagtntacgattggaaatggactggggttgtatcttcatccatagatcctttactcatatttattcaatcggaatacttatcggaatacttaatccaatgcaaaattttgcttcgcgactacgtactcataatcgaatttgtattttagatgcaaattcaattagtctggggatctaatcgcgagaatgtatattcttcctcaatatgctattgagaggaaaaggattaaaccctttataagaactaaagttttcatcggaatatgaatataaaaaaacttaaggatgccttaagtatatcatttcaaattcagttattaatagaacgaatcacacttttaccactaaactatacccgctacatgtagattatgataccaatgctaccctntgtcaagggtagccattcgagaaggaggctaattccaccttatcgaatcaaaggagaaagttcatggcggtgggcgattggtacttcaatcgcggggtcttactttaggatttagatagcccctctttagtct

SEQ ID NO: 462211 - DNA, 620 bp, Sorghum bicolor
  unsure (1)..(620): unsure at all n locations
agaaatctaattctgnnatggagaaacaaaatttctctcatttccgacgggggtggggttttttttttaatttcgaaataaaggttcttgtcttgtggggaacgatgcacaaatttttggaatccggtaccaacaggtataatcccccccagaactacgttttctttcaggcctttcaaccaatcaatactacctcgtggggggggttttgctaaaactcgagcagtttcttgaaaacttgcttcagatatgaaactttgggtattcagggaagcccttgttattcccaataagattgcccgataatagatcgattcatctaaagcccgccctgctcgttccgctcgcaatagtcctattaattccccaggtaaaaaaacattagacattccatcttcggaaacccttacttttgatgttacttggcgtataataatctctatatgtctattatggatctgtaccccttgggatcgataaaccttttggatcttattaaccaaagagatacgactttgggctatggttagctcagctccaatcaagaatccccagggaaccccaagaattcttggtatacgttcattccaatcctcaattctccttttcagattcggcga

SEQ ID NO: 462212 - DNA, 636 bp, Sorghum bicolor
attagacaatggacgcttctctttcgtattttactctttctttattattattatttctcggaacaagagaaataataaaaaactgttagaccgaaactcttttaggaaagaaaaacaaatccatataccatatacaaatggatgatacatatatcataaagaaggaatatggagcaggtagtcagtatcgaacccgtaaccccaagcttatgagctttgtgagctaccaaactgctctaccttcttagcggggaactggtggataaaagggggttggataggcctctctaccatatctatacaaatagaatagtccacttatacagaatggtaaagagggctcttctacgatcatcaattcgagaaaaccatacaaatatgaaagaaagggtattttatccttaccaactggatcttgttgcacccggtaacaaacatgcataaaccatttctcgaagtatgtgtccggatagcccaaagtctcgatagttagctctaggtcttccggttaaaaaacaacgtcgatgaaggcgtgtaggtgcactattacgtggtagggattgcaatttttcttgcatttttgttttttcgctcaaactcaaaggggaaacttttgcttcttatctttttttttga

SEQ ID NO: 462213 - DNA, 660 bp, Sorghum bicolor
  unsure (1)..(660): unsure at all n locations
ttcctacctcatacggctcatttttgctatcttaatgtcgctgtggtaactgaattcaatttctcaaaaatcaatccaatttcttcttgggttaagcagaagaagttaattacctaagtttcaaaccctaattttgatcaataatcagtttgatcttttctcccaccttcagaataattaagcataggggggcctatatccttcgttcgaattttctgaaaggtaactatctcggtttcgtttctttcatatatgaaatttctatagaatcctggaaaaagacctttttccataagaaagaaaaaagaacttactatctttgggatctgatactacaccgctgcttaatcccttagtggatcggctttattacataagcggattcctaaattttgtcccatatcgtggtataatgaagcagttttttttagttgtatcgacccagtcgctcactaattgatctttacggtgttttctctatcaattncagctttatccatagaatagtagtataggctctactttcttcctattttgattctcctgaagtgtccttccttcctacagcttatagggtaaaatccttgttttgacgatccctatgtagaaagccctcttttctagtattcactagaaattncctcctttcttttttcttct

SEQ ID NO: 462214 - DNA, 596 bp, Sorghum bicolor
cccaacctctattgttttcgcgtaaagcctttgggttcggcggcaggaaaaagtgactaccaattcccctgtttgtttgcgaatccctgtttgtatcctttgagcgcacgcccataagtagcgatcaaggaaatcgatcaaacgatcccaataccgtgaaagagaaacttcccatatccaggggggtggtcataaagggcttcaacaaggggttttattcgttctttgagcaaaaagataaagatcggatagattcgaaccgcaattgcaaaggtaataactactatgccagcccaaatcatgatcttcaccaacttggatttggttctctcgcgaaaatcgcgagttgcagagatgagaaccctgaaaagcaagatcccgaataagaaaatagaaaccgaggaaaccacaagagtgaagactagtagagtctcatcttttgtcattctttgctcctttttcactcaatgattcattcgaatttcccaaccaaaaattctatatgtctattctatgatatttctatatatatagaatatgatatctaatatgacaccccatttgtcaaagggattggattggtgacttacccattc

SEQ ID NO: 462215 - DNA, 681 bp, Sorghum bicolor
gtacagcttttcagcaagatagaagaacatttcttctatctaaaataaaagtattttgctgatttatttattgctatatccaatttatagaattgatataccatttaattgatatcatttagcaaaatgaaacacagcatatgcatccatctttgggctcgagaatttcacgggatagagatatagtataagaaataggctattaagtaactctaaatgaattgtggatacatctgtatccttaacatactgaaacgactgccattattcgtatcaaaccaatagcgattcataaaagctaaatcttgtaatcaatggtgtgccaataatgaatttttttgcatatgtattaagacgcttggtctgatttcgaaattgtccagagttttttatgttgttttcattgcaaaatgatggatctccttccgtaactttccaattacgagtacgagaattgaaagacatgaaaattctcaattctctacggcgtctaggagatagatcgaatattttcaggaacaagaaaatcagaagaatctttttctctattcactaccattccgcgtcttcgacttctattagtttcttttcttctttaatgcaatagctatagtttgatatagaatccatttctcaaagtaatggaaaccattctcttataggaaatggttcgaaaatcgc

SEQ ID NO: 462216 - DNA, 665 bp, Sorghum bicolor
ctcttttttgtttcttgtctataggaaaattacatgttattcaaggcggggatggagccccacaatttttttggtcctacttattgtcattgtcttcggaatagtagaataattaaatttggaatagcggccaagatcttgggaaaacctaagttaatgattaataagataaagaatttaggaaggatattctcatatgggggcaatacaaagataagtatatgcaaaatctatccctttttagttaaaggaatttaattggttagcataaaataatatctaataaatagaaaatcgaatagtggataatccgttatgaaagaaacggaatacattctttgaagaatcaagattcgtaatcaatccttgtcttgtttgttggattaggtctaactttcttgaccaaacagcaagcatggaactttacaagaagaacttaaaagaaaaggataattgaagtaacttcgaatcaacttttgttggggttcaaaaaacgaataaaaataaaaaaaaaagtaaattcaaggaatagttccctttttgagggggccccttgggggtcgtggaatgcttttcttctcctcttattccatatggaatacaatgagttaaaataagaaggaataggggaatattcgaccgtttgctcaaaaagaggatgaaat

SEQ ID NO: 462217 - DNA, 382 bp, Sorghum bicolor
gtacagtagttcatcaattctgggaaatatttcccgacataacaaaaaaatctttttttacgttttaatttaagaagctagtgtattttttttctgagggtataagtccctatctacatctactttccttgagtgagcataatatagattttttgattcgattccaaattccaagataactcattagaattattaataagaccgtcctgatatattaggtaggaatatttagattgccgacttttatgtactttattacttctgttccagagcctatccctattgtttatccttatgaaatatgatataaaattgaaggtagaagaaagggatataatgaaattcttgatttgatcttccaccctttttatgaaaatggaga

SEQ ID NO: 462218 - DNA, 557 bp, Sorghum bicolor
ttttgatttcttgctaattctatgcggggacaggagcgtccggtgtaatttcatcgatttggagattttgatcgtatctaagagatcctattttatctgggttgctaactcaatggtagagtactcggcttttaagtgcggctatgatcttttacacatttggatgaagcacaggggggtccagacttttggtagagtctagaagaccacgactgatcctcaaaggtaatgaatggaaaaaatagcatgtcgtaataaaatcaatttctttttttttataaaaaaaaagaaattgattttctgggtctagtgaataaatggatagagcctggctctaattctggtaaaataaaaaaaaaagcaacgagcttaacttcttaattggttaattggaaggattccccgatctaattagacgttaaaaatagattagtgcctaatgcaaggaaaggttaggttttcctatgagtggaccctttactttttttttagaaatcctaattattcttgattatggattgaaaagggatgttatgacttgaatgtgtaaaagaaac

SEQ ID NO: 462219 - DNA, 675 bp, Sorghum bicolor
  unsure (1)..(675): unsure at all n locations
catcattacctagaatttcatgtgattcagtaaacagaatatggattccatgattgcggggaggggggcgtaaggattgatgaagagtgagctgataatggaatttttcttctataaataggaaacttaagattcaaatgctccggaatggaaatgagggaatgtccacaatacccggatttagtcagatccaattcgagggattgggtagatggattaatcaaggattggcggaagaacttgagaagtttcccacaattaaagatccagatcacgaaattgcatttcaattatttgcgaaaggatatcaattgctagaaccctcgataaaagaaaggaatgctgtgtatgaatcactcacctattcttccgaattatatgtatccgcgagattaatttttggtttcgatgtgcaaaagcaaaccatttctattggaaacattcctataatgaattccttaggaacctttataataaatggaatataccgaattgtgatcaatcaaatattgctaagtcctggtatttactaccgctcggaattagaccataagggaatntctatatacaccggtactataatatcagattggggaggaaggtcggaattagcaattgataaaaaagaaaggatatgggctcgcgttagtagaaaacaaaagatatctattttag

SEQ ID NO: 462220 - DNA, 610 bp, Sorghum bicolor
caatcaattcttatctttagaccactctgagccgtttacaaacattacagcaagaggggaggagacatttatggctcccacataaataagaagttgtgcgacagctacaaagtaggaatttaataaaaaatagaataaggatatacaaacaagaactaatcccagcgaaaaggcagaataaattgggttggtaagtaatactacggggggacctcctagtagaagaacaaatcccccaaatagcacaagaatctcatgtattggtccaggtaaatccattatggataagaagaaatttctagtataaaatttttcatgaactgactaaaactaaaagattcaaggaaggaaaaaggtattaggatatttttttgtatatgcatataagttgttaagcagtagttatttttttttccttagagttagtaaaaatggatttttctaataaaaaaatcctaatacctagtaatccgtaatcgttcttgaattccaagatttttcttcgtctattttactttgaggcgaattcctaattgtttgaattgtgtaatctcccattatggagattggtaaccgactcaaagcaatttgattgtaattcaattcatga

SEQ ID NO: 462221 - DNA, 669 bp, Sorghum bicolor
ctttatgttcaacggaaaaaattctcaaaattaggaaaagtattttgcttcggttcgacctgcagtctcatatgaaatggacgaagggagaaatttagcaacacttttcccgcaggatctcctgcaagaagaggataatctccaacttcgacttgtcaattttatttctcatgaaaatagcaagttaactcaaagaatttatcacacgaatagtcaattcgttcgaacttgcttagtagtgaattgggaacaagaagtaaaagagggggctcgtgcttctcttgttgaggtaagaacaaacgatctaattcgcgatttcctaagaattgagttagtcaagtctactatttcgtatacacgaagaaggtatgataggacaagtgtaggactgattcccaataataggttagatcgcaacaataccaattccttttattccaaggcgaagattcaatcacttagccaacatcaagaagttattggcaccttgttgaatcgaaataaagaatatccatctttgatgattttgttggcatccaactgttctcgaattggtttattcaagaattcgaaatatcccaatgcggtaaaagaatcgaatcctagaattcctattcgagatgtttttgggctcttaggcgttatttgacccagtatatcgaattttct

SEQ ID NO: 462222 - DNA, 624 bp, Sorghum bicolor
ctaactcgcgatttcctaagaattgagttagtcaagtctactatttcgtatacacgaagaaggtatgataggacaagtgtaggactgattcccaataataggttagatcgcaacaataccaattccttttattccaaggcgaagattcaatcacttagccaacatcaagaagttattggcaccttgttgaatcgaaataaagaatatccatctttgatgattttgttggcatccaactgttctcgaattggtttattcaagaattcgaaatatcccaatgcggtaaaagaatcgaatcctagaattcctattcgagatgtttttgggctcttaggcgttattgtacctagtatatcgaatttttcttcatcttactatttattaacgcataatcagatcttgttaaaaaaatacttgttccttgacaatttgaaacaaaccttccaagtacttcaaggacttaaatactctttaatagacgaaaatcaaaggatttcgaattttggcagtaacatcatgttggagccattccatttgaattggcactttctccatcatgactcatgggaagagacattggcaataattcaccttggacatttatttgtgaaaattatgtctatt

SEQ ID NO: 462223 - DNA, 663 bp, Sorghum bicolor
  unsure (1)..(663): unsure at all n locations
atatctctgtatactgtatacacggatacataatccgctatatccgggggtgaaggaaaggctaaatcccctcccctcaactccatatccaaataaaagcggtaaggaaaaagttttaataaaaagaagaatcaatggattcatgattaaacccctcctacttcttgtattttcgtacaattttgattaagtgagggagggggtagaaatatgtagtcaactttatttgaaggtagtttggaggatcataaatatgactattgctttccaattagctgtttttgcattaattgcgacttcctcagttttagtaattagtgtaccccttgtatttgcttctcctgatggttggtcaaataataaaaacgttgtattttccggtacatcattatggattggattagtctttctggtagctattctgaattctcttatttcttgaatttgtttagtatttagtaacccgatacaaaataaataaaaagaaaggcccttttttcgaaaaaattcggatttttatacacattaaaatgctattntcgttccgaattattacctattctctttcattattatgaaattctattgccattagaatattgattgatagacaattaattaaaagaaactctaatagaaatgaaacggtcgacccaacataga

SEQ ID NO: 462224 - DNA, 675 bp, Sorghum bicolor
  unsure (1)..(675): unsure at all n locations
aatacgttcaatagacctttgnaatggaaatacaatgtaattagatagaaagggagaggggtagggacttttgttggattggcacgatataaatgcagcaaaaaaaaataggactaagaaagaggcaaattgtgtctaaataattaaggggtactaaggaccctctcctacttttttattcatttagttcttcaattaactgggggggctttctttatctttaaagaattctgccttccttaaaatatcataaacagttcttgtaggttgagcacccttttcaaggaaatagagaatagctggaacatttaaacaagtttgattctttatcggatcataaaaacctacttttcgaagatctcttccttctcttcgagatcgaacatcaattgcaacgattcgatagatagcttattgggatagatgtagataaacaacccccccctagaaacgtataggaggttttctcctcatacggctcgagaaaatgattcgaatttctgtctataatgcaaatagatagaaattcgattatgacttgcattaatttccttaaagaaaataaaaaacaaatttcatttatactcatgactcaagttggctaattttgactggcaaacttcaaaagaaaaacccttcgaaattttttgagtcgtctctaaactcttttcttta

SEQ ID NO: 462225 - DNA, 610 bp, Sorghum bicolor
aactcttatctaaaaataatcaagttattaatgactggacgaaaccaagaaataacccctgatgtgcgaaattatagaagatcccctttaagatcaaacaattccatcgaattgagtatgactgtatgtgtgatagcatctactataccaggaatatcaatgaaccccattcttgcaattgctcaggataccctcttttagctggtaggtctatttcttagttcaagatccctcttactaactggaataaaagaattagtagatctgttccgcccaaaatgggaatgggtgctagggttatgaacttataatcatggaatcgactcgatcatcagattataagttcattccataccggaccagatcgtgcacattcttattatgagaaggggtcattcgagcctatggaaataggatactctgtttacatagaaatccctacgtccttacattctatttaggattaggaataggtgtaatcagacctgcttttgacatatctatcctatccttatttgttgggtaccatatgcacctctttgggcttctattgaatcgagaaattggattgtacatctttttgattttgatatcgattttgatacatata

SEQ ID NO: 462226 - DNA, 513 bp, Sorghum bicolor
cactctgataaacgcagcaacacttgtatataacgtattgggaggggtggtaaattaatacacaatctgtccaagaaggaattgattcttaatcgtaaaatgcttgcacaagtagctgtatcaaatccaaataatctttacacgatttccaataaaataaggactatcaattaaaggatttatttgtaatggggggggataattaaaaccgtattcccggagaaagaactcccggaagatacaataaattaagattaagtggtaggaatcaacgagcatgttgcaataaataaaaaaacaatttcttttttcccatttttcttttttataacaaacacaagaatcaaaattggattactttctttatatatgagtctgagcctttcgaataaaacatcaacaatcggaacttaagttccgattgttgtttcttaaattctggttggagtttcttaagtttcgattggaattgaacttttgtgttaattgaggaatatgtctattttttctgtg

SEQ ID NO: 462227 - DNA, 671 bp, Sorghum bicolor
cccacaattaaagatccagatcacgaaattgtatttcaattatttgcgagggggggggaattgctagaaccctcgataaaagaaaggaatgctgtgtatgaatcactcacctattcttccgaattatatgtatccgcgagattaatttttggtttcgatgtgcaaaagcaaaccatttctattggaaacattcctatggtgagggccttaggaacctttataataaatggaatataccgaattgtgatcaatcaaatattgctaagtcctggtatttactaccgctcggaattagaccataagggaatttctatatacaccggtactataatatcagattggggaggaaggtcggaattagcaattgataaaaaagaaaggatatgggctcgcgtgagtagaaaacaaaagatatctattttagttctatcatcagctatgggttcgaatctaagagaaattttagataatgtttcctaccccgaaattttcttgtctttcccgaatgctaaggagaagaagaggattgagtcaaaagaaaaagctattttggagttttatcaacaatttgcttgtgtaggtggggacctggtattttcggagtccttatgcgaggaattacaaaagaaattttttcaacaaaaatgtgaattaggaagagttggtcgaca

SEQ ID NO: 462228 - DNA, 677 bp, Sorghum bicolor
  unsure (1)..(677): unsure at all n locations
attgcggagatttgattcattctttaatgtaagaataaagaattgaattaaaaggcttgctttgacccttaggagtaggtaacccgttcgctatccttgtttctattgcattctatctcatcgtatcacattctgttctacgattccacttcgacaaaaggaaagagcatacccaagttcaatagctttacgtccgctattccgatcatgattttcctaccctcagggagaaagtaaaggtccttccccctttggaaggctgtgggcgaggagggattcgaacccccgacaccgtggttcgtagccacgtgctctaatcctctgagctacaggcccaccccgtctccactggatctcttcccggggataccccccaaaaggaaccttcttctcctcagccatttcatttcgggttaagaagatgggaaagcgcctttctctctataagaacagtgcgttctgaggtgtgaagtgggagagaggggatgattgaggttttgaataagacgacctttgcgttttggatttggatctttttcgtatttcaaaatagtgaaaaagtaaaataagaggtgttaagctttttatcattctggcatcgagctattntgccgcangacctcccctacagtatcgtcaccgcagtagagtttaaccaccaaattcgggatggattg

SEQ ID NO: 462229 - DNA, 645 bp, Sorghum bicolor
  unsure (1)..(645): unsure at all n locations
gggactcgaacccggaactagtttgatggagtagataattcttccttgttacaatagaaaaaacccctccccaaatcgtgcttgcatttttcattgcacacgactttccctatgtagaaatagccgatttctattccgaagaggaagtccactaatttttagaatttttaattagttaaagtgattcacctgctgtggaacatttcagaatggaaaatgtgcaagttttatcttgatatcgatcttttctagtttattaattttgtctaatgattaattaagagtaagaggattcaccaggtcattgatacggataatatccaaataccaaatacgctcactttgtgatccatggaaagaaaagtgaattgttttggttttggtgaacatcaaagaaaaaacttgctcttcttccgtaaaaaattcttctaaaaataccaaacccaatcgttgcataaaagttcgtaccgnacttttatgtttacgagctaaagttctagcacatgaaagtcgaagtatatattttagtcgatacaaagtctgttttttcgaagatccactatgataatgaaaaagatttctacatatccgaccaaaacgatccagaatttcccaatctgataaatcagtccaaacgggtttact

SEQ ID NO: 462230 - DNA, 635 bp, Sorghum bicolor
aaactatttgctcacaagaaatttgtcccccgccatactttctttccctctgggggggagtaccgcgcccgaacctaagcaaaggaagtccaaaagacagacctgaataaagaataaatagtaatctttgacaaaacaaataagaagaaaaatgattcttacttcgatacaagaagaatcgacacaagaaaaaggctttttggggggggtcttgtgcccaatagaggattaagaagacccacaattcctcctaaaaggacttgttgcttttattgttctcgtctttgccttggatcctcttcttttgcatgagatagaaataaggaattccagaaatcgaggcttttttctaacttgatggtaagaaatcccaggatctagaaattcatttcgtacaattgaaccttttcaaactgtttctttttgagaaccaaaaaaacttgtgccaaaataacagatgcgaagaagaacaaaaggccttggacgcgcaatggatcctgaagcactatttctgcatccccctgaccaaaccctcctacattaggattggttgttaatggttgatcaagcttgattgattccccctctgaaaaagaagttctggcccgggagggataatatcaatcacttggcgt

SEQ ID NO: 462231 - DNA, 324 bp, Sorghum bicolor
  unsure (1)..(324): unsure at all n locations
tttggagattattccgtattacaatttgggggagggactttaggacatccttggggaaatgcacctggtgcagcagctaatcgtgtggctttagaagcctgtgtacaagctcgtaacgaagggcgcgatcttgctcgtgaaggtaatgaaattatcaaagcattttttttttttagggggggggtagccgcagcttgtgtaatatggaaggagatcaaatttgagggggggagagcgatggataccttatagatataagtagataaaactagatataaagaaggnctaaataaaanaaaaaagaagaaaaatngaaagggaaaa

SEQ ID NO: 462232 - DNA, 646 bp, Sorghum bicolor
atcatctcctcttctaagtttatagctttcgtgctagcttcatcgatgttccccactggataaggggcctgttcgggtaggccgtctaattctccggaaaggattagttgaaatcccctaattgtttctgcaagaccaacatactttcctggagaaccggtaaaaacttctgccacaaagaacggttgtgataagaaccgctcgagggggggggctcttgctacagttaaacgatcctcctccgataattcatccaatccaagaattgcgataatgtcctgaagttctttgtaacgttgtaaagtttccttaactctttgcgcagtttcataatgttcgttgccaacgatccgaggctgtaacatagttgaggttgaatctaaaggatctactgcgggataaatacccttggaagctaatcctctggaaagtacggtagtagcgtccaaatgtgcaaatgttgtggcaggagcagggtcggtcaaatcgtctgcaggtacataaactgcttggatcgaagttatagatccctttttggtagaagtaattctttcttgcaaagaacccatttctgtactaagggtaggttgataacccactgcggaaggcattctgcctaataaggcggatacttccgatcctgctt

SEQ ID NO: 462233 - DNA, 627 bp, Sorghum bicolor
aaatctcttctacgcacaataatatgttgaactacttcaacaagtctacgtgtggggaagggggcatccgctgttcgtacagcagtatctacaaccccttttcgggctccgtagcaggaaattatatattctgtcaaagaaagtccctcgcgtaaattgctttgaataggtaaatcaatcatttgtccttgaggatccgccagtgacgcggtcatacctactaattggtgtacctgagatgcatttcctctggctcctgaaaaagacattagatagactggattagaaggatccgttattcgaaaattcgaattcatttcttgtttcaaatattcacttgtagcataccatatctcaacggattggcgtaatttttctaccgcgtgtacagctccataataatagtgtttctccaaaagaaaactctgttgttccgcgtcttggactaaccatcctttagagggtattgttaaaagatcctcgattcctaaagaaatcgatgtagtagtggcttgatggaagcccagagtctttatttgatccagtatatgggaggtatatcccattccgaaatgatctattaatctgctaataagccggttcatagcagttccgtctatctcttta

SEQ ID NO: 462234 - DNA, 619 bp, Sorghum bicolor
atctctgctttcttaaagcgtcgggcttctaaattctcataaggtcctccagggggttgggggcagcctgttgaattatttttatggatgccctcatttcaccgactcgtactaaatagcgagctaacgaatctccttctttttgccattggactttccaatcgaattgattgtaagactcataaggatcgattttacgaaggtggaggggattccagaagctcgtaacattggtcccgataagccccaatttacagcttcttctccgctaataaaaccgactccttcaactcgttctaaaaaaatgggattccgtgtaataagttgttgatattcaacaactccttgtaaaaaataatcacagaaatctaaacatttatccatccatccataagggagatcggctgctacccctccgatgcgaaagtaattatgcatcattcgcatacctgtagcagcttcaaatagatcatatatcaattctctctctctaaaaatgtagaaaaaaggagtctgtgccccgagatccgccataaaaggtccaagccataacaaatgagaagctatacggctcaattctaacataattactctaatatagctggctctttggggtatt

SEQ ID NO: 462235 - DNA, 616 bp, Sorghum bicolor
ccataccttgggcctttatgttcatatcgacgttatgcttgcttttggtactccagaaaagcaaatcttgatcgaacctatatttgcccaatggatacaatctgctcatggtaagacgacatatgggttcgatatactcttatcttcaacgaatggccccgctttcaatgcaggtcgaaacatatggttaccggggtggttgaatgctgttaatgagaatagtaattcgcttttcttaacaataggacctggggatttcttggttcatcatgctattgctctaggtttgcatacaactacattgattttagtaaagggtgctttagatgcacgcggttccaaattaatgccggataaaaaggatttcgggtatagttttccttgcgatggcccagggcgcggcggtacttgtgatatttctgcttgggacgcgttttatttggctgttttctggatgttaaataccatcggatgggttactttttattggcattggaaacacattacattatggcagggcaacgtttcacaatttaatgaatcctccacttatttgatgggatggttaagagattacctatggttaaactcttcacaacttattaatggatataat

SEQ ID NO: 462236 - DNA, 603 bp, Sorghum bicolor
aatgattgatttacctattcaaagcaatttacgcgagggactttggtggggcggaatatataatttcctgctacggagcccgaaaaggggttgtagatactgctgtacgaacagcggatgctggctatcttacacgtagacttgttgaagtagttcaacatattattgtgcgtagaagagattgtggtactatggggggtgtttctgtgagtcctcaaaatgggatgacggaaaaactttttgtccaaacactaattggtcgtgtattagcagacgatatatatattggttcacgatgcattgcttctcgaaatcaagatattggaattggattagtcaatcgattcataactgcctttcgagcacaaccgtttcgagcacaaccaatatatattagaaccccctttacttgccggagcacatcttggatctgtcaattatgttatgggcggagtcccactcatggggatctggtcgaattgggggaagctgtaggtattattgcgggtcaatcaattggggagccagggactcaactaacattaagaacttttcatactggtggagtattcacagggggtactgccgaccttatacaacccc

SEQ ID NO: 462237 - DNA, 622 bp, Sorghum bicolor
acctctttgattgagaattgtatctgtggctactgctgttttgccagtctgtctgtccgcaataattaactctcgctgaccgcgccctatggggatcatcgaatcgatagcaataagccctgtttgaaggggttcatatacggaacgcctagaaattatacccggagcaggagattcaattaagcgagattctgaagcgacaattgggcctctcccatcaataggtttagcgagagcatttataacacgacccaagtaagcctcgctcacgggtatctgagcaattcttcctgttgcttttacaaaacttccctcttgtatcatcaacccatcgcccattaatacaatcccaacatttttggattccaaattcagagcaatacctctcgtcccttctgcaaattcgactaattcacctgacattatttcaccaagacctataatacgagcaatcccatcccccacttgcactacgcgaccgatattctcaatccctactttcctattatattgttcaatacgttcgcggagaattttattaatttcgtcgactcgaagggttgccattagtgtttctttaattttttggaagcaagggaaaaataatgcctaaattctaaac

SEQ ID NO: 462238 - DNA, 636 bp, Sorghum bicolor
tttatgggcgaaagcgtttctttaaatcgaccgggggggggtgactcactaacatcattaacaaacaaaagaataaatagagggattccaaccatcagagcaaaggttttctctttgttatttttacaaatagaaataggtaaccaatttctagattatggaataaaaccgttttataacaatgggggggggcgcgggccctttccgctctaatcagataaaggggagtaaggacccgctaagttcctactttttcatgtttacaatctggatcctccgattactatagagatgaacccaatccagaatacgaaccgtaaaagaaaacacctattaaaccaatcacaagaataccagttacagtacctatcagccaaagaggaattcttccagtagtatcggccatttcccctactttcctccacattttctcaagtggtcatgctagagacaaaaacagtcatggatagttataaagatggtatccttccaaatgggataagagaattcttactactctctttctttctctcaattgaagaaataattggaaaataaaacagctagtacaaaaatgagttataaaccccaatatagactggtacgattcaattcaacattttgttcatttcggtt

SEQ ID NO: 462239 - DNA, 332 bp, Sorghum bicolor
  unsure (1)..(332): unsure at all n locations
tttttaaaacaattaagggggggggggggaactaaaacacataaaaaagagcatagagaaccattaccaaacgttcctcctaagaatcatattgggtatctgtccccttccttttaaccctaggatcaaaatctagaatcctcccttttcctagtgttcttaaacgggttgtntggaacctnnannanttanntatntanaatatcctttttattttttgttnnccaaccantantataatttttatactctncaatataaattcnactcccaacttttttttaaaataaaattnttnataaaactccaacatantttnttccaaatccact

SEQ ID NO: 462240 - DNA, 510 bp, Sorghum bicolor
  unsure (1)..(510): unsure at all n locations
ttatttcacctcaactttttcattctcnnattttggggaacgggattataaaactncncaaanagttaaggaaactttacaacgttacaaagaacttcaggacattatcgcaattcttggattggatgaattatcggaggaggatcgtttaactgtagcaagagcacgaaaaatctttctggtttatgtgaccgntctttgtgtcataagtttttaccggttctccaggaaagtatgttggtcttgcagaaacaattaggggatttcaactaatcctttccggagaattagacggcctacccgaacaggctttttatttagtggggaacatcgatgaagctagcacgaaagctataaacttagaagaggagagcaaattgaagaaatgaaattaaatctttatgtactgactcctaaacgaattatttgggattgtgaagtgaaagaaatcattttatctactaatagtggccaaattggtgtattaccaaaccacgcccccattaacac

SEQ ID NO: 462241 - DNA, 594 bp, Sorghum bicolor
  unsure (1)..(594): unsure at all n locations
gaacaggatctatggncggnccgngacccttggacgccgaaggcgtccttggggtgatctcgtagttcctacggggtggagacaatggggtcggtccatggattttccttccttttgccacatttcgctcaaagggttgaagggagatagtgcatcaagctattcgcaagggccaacttgatcctcttccccagggatcccagatgagggaagcctaggagagccgccgactccaactatcgtccatgtacgatccatactagatctgaccaactgcccatcctacctcctctacctttttgacagcccatctttttgtctcagtagagtctttcagtggcatgtttcagtcctcttccccattacttagaaaaagtgagccaccggttcaggtacaagatactatcattaccgcctggacaattagacagccaacccgnaatcgcaacgacccaattgcaagagcggagctctaccaactgagctatatcccccccgagccaagtggagtatgcatgaaagagtcagatgcttcttctattcttttccctggcgcagctgggccatcctggacttgaaccagagacctcgccc

SEQ ID NO: 462242 - DNA, 633 bp, Sorghum bicolor
tcctgtttggtatcagggttgggaagatttgttgggataacaaacaaccatcaggtttgtactttggatacccttataaccatcaaaggtcgttgaagtggctaattcctctaaataggaggcgttgagaacaaagaaattcttggagctatcgttttcctctagcattaatataattcattggtgttaagaaaaacctgttgggggaaggttggctagagatttcttggaaaaataccagcccccttcggtccataatgagatgggactaattctatttttattctatagatttttcgcttagtactaggtatagaagggagaagccatatgagagtatagaagggagaagccgtatgagatgaaaacctcatgtacggttttggaacggagattttttgaatagaatgaacgaccgtaacggatgttggctcaatccgaaggaaattatgcggaagctttgcagaattattatgaagctacgcgactagaaattgatccctatgatcgaagttatatactatataacataggccttatacacacaagcaatggagagcatacaaaggctttggaatattatttccgggcgctagaacgaaaccccttcttaccgcaagcttttaataatat

SEQ ID NO: 462243 - DNA, 449 bp, Sorghum bicolor
  unsure (1)..(449): unsure at all n locations
caattcttccgggggggggaggggtacttaagatcctctgttttcgattagcgaataaatcttttaatgaaagtagattatcttgctattaagtttacaatttttatgatctcttcccgaaccaaacatgaatctttcgattcatttggctctcccgctccgggggggggtggtntgntatgtattatggctatttccatatcttttttttatgtaatgagcctatcctctatcctctcttttctgtttgtatttctatatacccaaacttatataagactagatgaatattaagaggactcttccaaccagaaaaaaatctatcatggtcagcaaagttggttctttatttgtgtttgctctgttagttaataatttcaatttcattaagaaaaacaaactaaataaatggaaaaaaaaaattgatagaatccttttattttttcttc

SEQ ID NO: 462244 - DNA, 552 bp, Sorghum bicolor
cccgccaactgtctttttattgaatcttttaatgatagatattatgattggggctggggtttactatctaccgtccttctatttttgtttagttattcactggagcaattatatattgaagtcaatccaaggcaagtgttcggatctattatgacataaggattaggtgcctaacggacattggttattctgggaaatgagggggggacataacaaaaaaatctttttttacgttttaatttaagaagctagtgtattttttttctgagggtataagtccctatctacatctactttccttgagtgagcataatatagattttttgattcgattccaaattccaagataactcattagaattattaataagaccgtcctgatatattaggtaggaatatttagattgccgacttttatgtactttattacttctgttccagagcctatccctattgtttatccttatgaaatatgatataaaattgaaggtagaagaaagggatataatgaaattcttgatttgatcttccaccctttttatgaaaatggag

SEQ ID NO: 462245 - DNA, 630 bp, Sorghum bicolor
  unsure (1)..(630): unsure at all n locations
ttgagcagccgctcgtagatcgcctgaaaaattaacttantgatnggagctatatcctgccatgagaagaccaataggagcaatacttgaaatcgcaatccataaaaaaacaccaatactaagatcagctaaaacaaaacgatatcccaaagggataactgctatgggagcctgttctattacagggggggtgttcagtacagattcctatagtactgttcgaggagttgataagttaattcctgtggacgtctacctgccgggttgcccgcctaaaccagaggctgttatagatgccctaacaaaacttcgtaagaagatagcgcgagaaataattgaggatcgaactctatgtcaaagtcaaaagaaaaatagatcttttactacccgtcacaaactttatgttcggcgcagtactcacactggaacttacgaacaagaattgctctatcaatcaccatctactttagatatatcttctgaaacttttttcaaatccaaaagttcagtatcttcctacaaattagtgaattaggaggggttcttttgtgcagaaaaagaaagagcagtgcaatctttcaaacttgcatttgaaatgtgaaatatttatacaaagggggagagatcaag

SEQ ID NO: 462246 - DNA, 514 bp, Sorghum bicolor
  unsure (1)..(514): unsure at all n locations
gctgggtggaaaacaaactgttctancaagatttgtaatatgagtacctttacgctttgccgagatgtaaggggccattttgggattccatttcttaataccatgaccaaaatgaactcccgcttctatcatctctttcaaattgatgtgggggtgtcttcttntcattttttccacacttcctttttattttttcttttttcgtcttaccattacngaattaatttctttttgaagattaaaaaagagccgaaatagcttgaaataaataataattgttccgatggaaccttctactcataattgaccattgatacacggtataaacatagccttaatgaattaactgacttcttttacttattcaaatacaattcaaatacaattcaaattcaaatacaaaatccaaaatcagaccttttagcattctaaggtcaaaagtatagtttaaatttaagtaaaaaaaaattgctttatgtatacttaaatcgtataaataggggtaaacggggtc

SEQ ID NO: 462247 - DNA, 614 bp, Sorghum bicolor
aaaaagataatgagcatgcggtaacaattccatgttgacccgaatcaatccgtgtgctgcgatctttaatagaattccggctaaaagcatacatgtactgtaatgcgcttccccatgggtatctggtaaccacgtatgtaaaggtataatcggcaatttgacagcataagcaataaggaagccaaaatacagtagtatttctaggtggggtagggtatgattgattaatcaatctttctaaatctaatccgggttcattggaaccatataatcccatacccagaactccaattaagaaaaaaatggaaccacccgcagtatacaaaataaacttggtagctgaatacagacgcctctttcccccccacatggataaaagtaagtaaacaggaattaattctaactcccacatgataaaaaaaagtaaaaggtctcgtgaagaaaataatcctatttgaccgctatacattgctagcatcaggaaatagaataattgcgaattccgagtaaccggccaagccgctaaagtagctaaagtagtgataaatcctgtcaataaaatagatcctaatgaaagtccatcgattcccaatctccagtggaaatcgaaaaca

SEQ ID NO: 462248 - DNA, 604 bp, Sorghum bicolor
tttgcttattctgtattcgcgttggtaagttaaactcgatagctatatgagtgaaacaaaacagcttattaatttgtagtaaaaataaaaaatctcatttcctacgtacaagaaaaaagttaaagtaaacataagcagtgtaaactctttaccccaaggttgagattgtttaattagtcatcatatcttgaagcgggcaagaataaaggattctcgatatggaattccattactagaatattttgagttattactataatttaaacttataaccataaggcaatccatcaaaagttagtgagggattaggaacactaaagtacatacaggattagtaatgagagaatctaaatcattagacatttttcctcataaaaggaatcataataaggacttgaaattggtggaaatgatcaagcagtactttcttcagattccggtctagagtatgttcccattcacttgttaaggaaatggctatcaagaacgaattaaccctttattcttttttttaagtataccccttccggggaaagaagaattggacaaaagatacggaatacaatacaaaaaaggatccttatttattctttccttcctttat

SEQ ID NO: 462249 - DNA, 648 bp, Sorghum bicolor
  unsure (1)..(648): unsure at all n locations
gtgtctatggattggtttgatcaaaaacttttgctaaggnntatggnccaaagaanntgtcataaataatnattaataaaatcgaagttgaagttggagttaccaaagtttgtggagtcggtttcgattgacgtatgaatactctacggatagttttttgaaccgcatgttgtaaacggccaagagctttttcgggggtagcgggtgacanatctgcaacctaacgaatacaaatatttttcaagtgattcatatcgtcatcgtcaagtatacccgttccaaatttcattccaatcaaatgatccgtagcggccaatacatctcgtggtaacaagaatgtattgttctgagggatatcaagattcagtctccgattcatatttcgtcgaccaactcttcctaattcacatttttgttgaaaaaatttcttttgtaattcctcgcataaggactccgaaaataccaggtccccacctacacaagcaaattgttgataaaactccaaaattagcttttcttttgactcaatcctctttttcttcttagcattcgggaaagacaagaaaatttccgggtaggaaacattatcttaaatttctcttaaattccaacccatanctgatgatagaactaaaatagatatctttt

SEQ ID NO: 462250 - DNA, 617 bp, Sorghum bicolor
catcaccttggggtgatctcgtagttcctacggggtggagacaatggggtcggtccatggattttccttccttttgccacatttcgctcaaagggttgaagggagatagtgcatcaagctattcgcaagggccaacttgatcctcttccccagggatcccagatgagggaagcctaggagagccgccgactccaactatcgtccatgggcgatccatactagatctgaccaactgcccatcctacctcctctacctttttgacagcccatctttttgtctcagtagagtctttcagtggcatgtttcagtcctcttccccattacttagaaaaagtgagccaccggttcaggtacaagatactatcattaccgcctggacaattagacagccaacccgtaatcgcaacgacccaattgcaagagcggagctctaccaactgagctatatcccccccgagccaagtggagtatgcatgaaagaatcagatgctccttctattcttttccctggcgcaactgggccatcctggacttgaaccagagacctcgcccgtgaagtaaatcatcggccctacgatccaaccaattgggagagaatcattagactccttttggg

SEQ ID NO: 462251 - DNA, 635 bp, Sorghum bicolor
atttatggttaaagaagaaaaacaagaaaacatggggttctgttgaatttcaagtattcagtttcaccaataagatacggagacttgcttcacatttagaattacacaaaaaagatttttcatcggaaagaggtctacgaagacttttgggaaaacgtcaacgtttgctggcttatttggcaaagaaaaatagagtacgttataagaaattaatcagtcagttggatattcgggagaagtaatttaatcgttcgaatttttttcctattttattagtagtcttatagtagtcttagattttgcattttgatgagcctcgttttgaggaattcatggaataatccattttcatggaataaagaataagaacaaggatacgtaacataaaaaaaagaatagataagacgatattcgccctccccctacatatttgatttcttctcctatacaaaaaccagcaagacctactccattgataattccatcaatgacacctttatcaaaaaaatgcgttagttcagctaatcttcttatacctaggataaaaaccctagtatagaaaaaatctatataaccacgattatatgaccagctgtatatctttttttttacttcatccaaaaagctcttttttg

SEQ ID NO: 462252 - DNA, 657 bp, Sorghum bicolor
cgacgttggttgattatttttgacgtctctaattcaaaaccgaacatgaaattttgatttcattcggctcctttatggatattctcaccacttaacatctatgtcagcttttctgtctgaatggaaccaaagctctctgctttctagatgatccttatagagtaggagatagaaattctcctaaatatctatctaatctacttacttcgttccctaatttcattcaagagatcctgaggaaaagagttgggtttccaccgagctgaaacaatataatatactgatggttctagtaaaccaaaaccatcgttttttagctattgggcttccatttcctacaaaacaaaagaagatttagttacgattggaaataaacttttttgtatcttcatccatagatcctttactcatatttattcaatcggaatacttatcggaatacttaatccaatgcaaaattttgcttcgcgactacgtactcataatcgaatttgtattttagatgcaaattcaattagtctttggatactaatcgcgagaatgtatattcttcctcaatatgctattgagaggaaaaggattaaaccctttataagaactaaagttttcatcggaatatgaatataaaaaaacttaaggatgccttaagtatatcat

SEQ ID NO: 462253 - DNA, 603 bp, Sorghum bicolor
atccaaaaatgttgggattgtattaatgtgtgatgggttgatgatagcggggggggggttttgtaaaagcaacaggaagaattgctcagatacccgtgagcgaggcttacttgggtcgtgttataaatgctctcgctaaacctattgatgggagaggcgaaattgtcgcttcagaatctcgcttaattgaatctcctggggggggtataatttctaggcgttccgtatatgaaccccttcaaacagggcttattgctatcgattcgatgatccccatagggcgcggtcagcgagagttaattattggggacagacagactggcaaaacagcagtagccacagatacaattctcaatcaaaaagggcaagatgtaatatgtgtttatgtagctatcggtcaaagagcatcctccgtggctcaagtagtaacaactttccacgaagagggggccatggaatacactattgtagtagctgaaatggcggattcacccgctacattacaatatctcgctccttatacgggagcagccctggttgaatattttatgtaccgcgaacggcatactttaataatttatgatgatctcttcaaacaggcac

SEQ ID NO: 462254 - DNA, 674 bp, Sorghum bicolor
  unsure (1)..(674): unsure at all n locations
gtacagnatttcatcatggcaacttccaaattcagagaaaccctggaatgataaatgggcaatcctgagccaaatccacttttttcaaaaaagtggttctcaaactagaacccaaaggaaaaggataggtgcagagactcaatggaagctgttctaacgaatcgaagtaataacgattaatcacagaacccatattataatataggttctttattttattttgagaatgaaattaggaatgattatgaaatagaaaattcataatttttttagaattattgtgaatctattccaatcgaatattgagtaatcaaatccttcaattcattgttttcgagatcttttaaaaagtggattaatcggacgaggataaagagagagtcccattctacatgtcaatactgacaacaatgaaatttctagtaaaaggaaaatccgtcgactttataagtcgtgagggttcaagtccctctatccccaaaccctcttttattcgctaaccatagttgttatcctttttttttatcaatgggtttaagattcactagctttctcattctactctttcacaaaggagtgcgacaagaactcaatgaatcttatgctattcattaaatagatgatttcttttttatctcttttttttttatttattagaatacagtatcggcaag

SEQ ID NO: 462255 - DNA, 612 bp, Sorghum bicolor
  unsure (1)..(612): unsure at all n locations
cctttgtcaagggtagccttcgagaggtagctattcccctgaggagtggggggagaaagttcatggcggtgggcgattggtacttcaatcgcgggtctttactttaggatttagatagcccctctctagtctgtaaaatacatctcttcttaccataccaatagcgtatgaaccaaatgtatgcatttcgggggggagctattctacggttatgactacaaggatcattatttgtaaggacgtaaatgtgccagactgttgtctggaatcgtttaattattcctacaatatatactaagagatataaaggcagtacaatcccctccctttcttccttttcttttttgttcagaattgaacaaagaaattgggaaagatgttttcttcctccacgtatcatgaagtgcgagccatagggaaggagtgagatgactttcacaaatttatcatagacttcgtctatcgcttgagagaagcaacaaagagtaataacttaaaaagaaaaacagatacgaatcgacagatttacctgatgaaaattgacatcagaggactctgatgaggattcctcanactcttcataaagaggatccagaaagtctctggttagtc

SEQ ID NO: 462256 - DNA, 613 bp, Sorghum bicolor
ttggcgtccatccgacgcatccactatggatatttcatatccccccttttctttacgtagtattttttttactatacctgttgacgtagcattatagaccgtattgttactcttgctaccatcaggatagatctgtccccttcctcggtttccccctacatatatgggatattttaagaaatgaacgtctttttttgtagcgggatcgggggaaagaatgggaaagacaatttcactatatttcttaccgggaacagggcctatcacaagaatattttttttattgggacgataactctgaaaagagagatttcctatcttttctttcaactcaggagaaatacggtcgggcggcgctaattcgaatccctcaggcaaaataagaacagcacccacattcaaccctccctttttaccattagcaagaacttgtttcagctgcatatcataaggaattcgaagaactgcttcaaatacagtatcaggaagcactgcttggggaacttcaatatctacaggcttattagctaaatggcaattggcacatacaattcgtccagttgcttcccgcgggttttcataaccctgctgcgcaaaaatgggatatgcgttt

SEQ ID NO: 462257 - DNA, 544 bp, Sorghum bicolor
ttaaaaaataagaaaattgcaaaaaaggggaactaaaaaggggaactcattaaaataaaatgttgaatttatcttttcccattctcatcgcctttctatccttctaatcgaacttgaaattggattcaaaagaaagctattgtgaaaataaaagaaatacctctttcagaatacccttgaatttaaagggtagaagtgggatagaatacccagttgaagagtaatgatcatacgtctgtaatgcattgtatgtcccagaataggtcccattcttctaccctttccgggtagtcgatggctattcacagctactaccttaacaccaaagaagagttcgacccaatgctttatttctgtcttagtgaatcccgattcgacattaaaagtatattgattctttcccaataaacgaagactcttttctgtaaatactgcgtatttgattccattatcggacgataatactatatttttatttatatttggttattggattatacctttctatattctagatatatagaatagaagaatctcgatttgt

SEQ ID NO: 462258 - DNA, 620 bp, Sorghum bicolor
acaacgttatgaaaacccgcgggaagcaactggactaattgtatgtgccaattgccatttagctaataagcctgtagatattgaagttccccaagcagtgcttcctgatactgtatttgaagcagttcttcgaattccttatgatatgcagctgaaacaagttcttgctaatggtaaaaagggagggttgaatgtgggtgctgttcttattttgcctgagggattcgaattagcgccgcccgaccgtatttctcctgagttgaaagaaaagataggaaatctctcttttcagagttatcgtcccaataaaaaaaatattcttgtgataggccctgttcccggtaagaaatatagtgaaattgtctttcccattctttcccccgatcccgctacaaaaaaagacgttcatttcttaaaatatcccatatatgtagggggaaaccgaggaaggggacagatctatcctgatggtagcaagagtaacaatacggtctataatgctacgtcaacaggtatagtaaaaaaaatactacgtaaagaaaaggggggatatgaaatatccatagtggatgcgtcggatggacgccaagtgattgatattatacctcccgggccagaac

SEQ ID NO: 462259 - DNA, 503 bp, Sorghum bicolor
attgcttatttcatataaaaggaaatcctaatgactagaattctctgagggggagaatgtcttgtttaagagacttggaattcaattatgcaatagctttctgaacttaattaactatttgaattgaattttaccttccttctttttatgcccccctcttatatgagggcttatcccccataccatatatttatagggggagtatatttgatatataaattgattgaaatagaaaatcttaaaaaactctggtcttatccacattagacaaaatgaactaaagaagaatttagaatttaagtatcttgcaggatcatttaagtatctttcagtatctaagtataaatactaagaaaaaacagaaagaaggattgatttgcggcaatagatgtctttcacatacaactagaaagagggaattccctttttgaatggcggttcgaaacaaacgtactgcgatgtcaaaaaagcgtatgcgcaaaaatgcgtggaaaaaaaagact

SEQ ID NO: 462260 - DNA, 481 bp, Sorghum bicolor
aatactcagcagcttgagctatccaagctcgcagagtttcacaatcgcactgtacaatggccatgggctccaaaggattgtaataggcaacaactcatcctagaaccggtcatgagagttatctaccaaagacgggggacaaagtgacttcttcaacgactctatcttaacggaagatgatttttgaaaaagcaatccaatgtcgagggggagcgagcacaaagaagaagatgacctaggttataaaccctaatcatgatcaataatcaagaaagaactttatttccacctcgagcagacagaagcattaatagacctatagccttcgttagaatcatcggaaaggttactatctagagccaaagatcgtcatatatgaacgagctctcgaatactgtataaagacctctctccattagacacaataaagaactcacatatctgcaggatctgatactacaccagcgcttaaacgatcaga

SEQ ID NO: 462261 - DNA, 654 bp, Sorghum bicolor
caagaagtcgactaggtggattggtccgagtgaagagaaaaaaaagccatacagaactcaaaatcttttccggagatattcattttcctgaagaggcggataagatattaggtggcagtttgatacccccagaaagagaaaaaaaagattctaaggaatcaaaaaaaaggaaaaattgggtttatgttcaacggaaaaaaattctcaaaagcaaggaaaagtattttgtttcggttcgacctgcagtctcatatgaaatggacgaagggagaaatttagcaacacttttcccgcaggatctcctgcaagaagaggataatctccaacttcgacttgtcaattttatttctcatgaaaatagcaagttaactcaaagaatttatcacacgaatagtcaattcgttcgaacttgcttagtagtgaattgggaacaagaagtaaaagagggggctcgtgcttctcttgttgaggtaagaacaaacgatctaattcgcgatttcctaagaattgagttagtcaagtctactatttcgtatacacgaagaaggtatgataggacaagtgtaggactgattcccaataataggttagatcgcaacaataccaattccttttattccaaggcgaagattcaatcacttagccaacatcaag

SEQ ID NO: 462262 - DNA, 638 bp, Sorghum bicolor
atttctcaagaacaatagctaagggtcccgacactaccacttggatctggaacctacatgctgatgctcacgatttcgatagtcataccggtgatttggaggagatctcccgaaaagtctttagtgctcatttcggccaactctccattatctttctttggttgagtggcatgtacttccacggtgcccgtttttccaagggtgaagcatggctaagcgatcctactcacattggacccagtgctcaggtagtttggccaatagtaggacaagaaattttgaatggtgatgtaggcgggggtttccgaggaatccaaataacctctggtttttttcagatttggcgagcatccggaataactagtgaattacaactctattgtaccgcaattggtgcattgatttttgcatcgttaatgctttttgccggttggttccattatcacaaagccgctcccaaattggcctggttccaagatgtagaatccatgttgaatcaccacttagcggggttattaggacttgggtctctttcttgggcgggacaccaaatccatgtttttttaccgattaaccaatttctcgacgctggggttgatcctaaagagataccacttcctcatgaatttatttgaatc

SEQ ID NO: 462263 - DNA, 589 bp, Sorghum bicolor
gtacagtatttcatcactttttagttccccttttttgcaattttcttattttttaaactaaaaaatacaatagtcaatattccttataatagatatacttaattatatcataagaatcttaagatatatttcgaatagatagaaatagtaaatttgaattgagacacatattctatgacagatcttaacttaccctctattttcgtacctttagtaggcttagtatttccggcaattgcaatgacttccttatttctttatgtgcagaaaaataagattgtctagaaacgacggggccaaattttctcaatgtatttccaggatcataatacagatatttttttgtgtaagtagtataatatgatagggtatgtagctctttctacacacaaatgaaaacgtctatggatgcagatataagctacgagcataaatgcatgcatatgcgtagccgactatagcgagtttttttttattttaagtggatccactaatttttttgaatagaaagtcaatgtatctaaccaattatttcacaggagtactagctactgaaggctatttcagaatcaaaaaagtaagtaaaaat

SEQ ID NO: 462264 - DNA, 659 bp, Sorghum bicolor
tatggataagaagaaatttctagtataaaatttttcatgaactgactaaaactaaaagattcaaggaaggaaaaaggtattaggatatttttttgtatatgcatataagttgttaagcagtagttatttttttttccttagagttagtaaaaatggatttttctaataaaaaaatcctaatacctagtaatccgtaatcgttcttgaattccaagatttttcttcgtctattttactttgaggcgaattcctaattgtttgaattgtgtaatctcccattatggagattggtaaccgactcaaagcaatttgattgtaattcaattcatgacgatcataagtagaaagttcatattcttcagtcattgataaacaatttgtgggacagtattcaacacagttaccacaaaatatacaaactccgaaatcaatactataattaagcaattgttttcttttaatatccttttcaaatttccaatccacaaggggtagatctatcgggcatacgcgaacacatacttcacaagcaatgcatttatcaaattcaaagtgtattcgcccccggaaacgctccgatgtaattgatttttcataagggtagtgaatcgttataggtaaacgatttgtgtgggaagggtaattattaaaccttgacc

SEQ ID NO: 462265 - DNA, 565 bp, Sorghum bicolor
atcaggattagaaggatccgttattcgaaaattcgaatttatttcttgtttcaaatatgcactggtagcataccatatctcaacggattggcgtaatttttctaccgcgtgtacagctccataataatagtgtttctccaaaagaaaactctgttgttccgcgtcttggactaaccatcctttagagggtattgttaaaagatcctggggggggtaaagaaatcgatgtagtagtggcttgatggaagcccagagtctttatttgatccagtatatgggaggtatatcccattccgaaatgatctattaatctgctaataagccgtttcatagcagttccgtctatctctttattatgaaagaccaggttggcccgttctgccatacataagtacccccttttttggctgagtaggattcgacaattgctgagtaggattcgacaatgggcctgagtcagtgattcgaaaactttatttactccctttcctcaatctcaatctggatttgcgcggcaaaaaagatggtactagcgaaatcggaatgccccccgaaaggggcatcg

SEQ ID NO: 462266 - DNA, 593 bp, Sorghum bicolor
catcattttagtaattagtaaaaaaatgtggatgaatacttgctcttttctcgattttggatcggattttttggcggcatggccaagtggtaaggcaggggactgcaaatcctttacccccagttcaaatctgggtgccgcctgatcaataaaatacttaggattatagtactgatcaaactcgacaaattcgtacccccctaagttggtgcgcgagagtaactaggtttggcgatactggattttgagaatccataccatagttctaccctcaaactagggtttgttttgtgggcagtggcccaaacggttaccaatagggatgaggtagcgtttccttattcttttattaatttaaatcgattcgattcgggaatttaaaactacgagactaagatgtcagaaatcttcgtagccaaaggtccctaaggggcagtcttttttcaatctaagattgaagaagggactttgcgaagaaatagaaagacttcctaattatcatacattttatttatcgtacatcttactacatacacttagtatatcttatgctacctacatacactaaagtaaaggctactgattctgtcgag

SEQ ID NO: 462267 - DNA, 426 bp, Sorghum bicolor
  unsure (1)..(426): unsure at all n locations
ccaaattcttgatactattataaggttaggggaccgcctntatattangtaggaatatttagattgccgacttttatgtactttattacttctgttccagagcctatccctattgtttatccttatgaaatatgatataaaattgaaggtagaagaaattttataatgggagtggggtttnatcttccaccctttttataaaaatnnanantnntcttattcaaattcaaancncttcntaatctttaaccanttctntncttcaatataatttcctnnaataacccctatancttntttccaatactcancancttnatcaaaccaancttncncaatttcccaatcnccctttanaatnncctnnnctcctcnnnccnaataaccanntcctttccctaaaaccnnacttnanaatttcctacc

SEQ ID NO: 462268 - DNA, 631 bp, Sorghum bicolor
atcgacgaatcaaatgatatttttgttctaatttatgccgcttcttctccctctgaatcaaacttttttttgccataatgtgccgttcctattattaccaagtatatggttctaatcctagatagaaaaataaatagaaaaaatctaaaaaggcggatcctccctctccatcaagagtaatgaactgggttctgatacagtacaaaaaaaaataactaaattaaccaaacttgcctgatgttgaggcaatcaagaaagctgcataagtgaatatataacccacggaaaagtgggctaatccgaccaatcttgcttgcacaatggaaagagccacgggcttatctctccagcgaattaaattagccaaaggtgtgcgttcatgagcccatgctaaagtctcaattaattcctgccaatatccacgccaggaaattaagaacataaatcctgtagcccaaacaagatgtccaaataagaacatccaagcccatactgataaactattcatcccaaaaggattatatccattaataagttgtgaagagtttaaccataggtaatctcttaaccatcccatcaaataagtggaggattcattaaattgtgaaacgttgccctgccataatgtaat

SEQ ID NO: 462269 - DNA, 618 bp, Sorghum bicolor
cttatagcttccttattcttagacaaagcggattccgaagggtgtttccttccaaggataacttgtatccatgcgcttcagattattagcctggagttcgccaccagcagtatagccaaccctaccctatcacgtcaatcccacaagcctcttatccaaattcccgttcgatcttttttttttggagtgagtggggatagaaaaaactcacattaggtttagggataatcaggctcgaactgatgacttccaccacgtcaaggtgacactctaccgctgagttatatcccttccccgtcccatcgagaaagagaattaacgaatcctaaggcaaaggggcgagaaacgcaaggccaggccactcttcctccgggctttctttccgcactattatggacagtcaaataatgggaaaaattggattcaattggcaaccggtcctatcgaaaataggattgactatggattcgagccatagcacatggtttcaataaatcttgacaaatttcccgatctaaatcgagtgggtttccatgaaaaaaatcttggtcagcatgttctattcgatactggtaggagaaaaacccgacttcgtattcttaaaaaagagggaagcag

SEQ ID NO: 462270 - DNA, 642 bp, Sorghum bicolor
aaaacaatcttgtatgagagtacatgcaagaggggcaaccctatcatttgaacgaagtgtagacagaaatacctaatatggagtgacaataaagagacccatctatctacaaattctatttgttcaatagacctttgtcaatggaaatacaatgtaattagatagaaaaaggaaataaaatagggacttttgttggattggcacgatataaatgcagcaaaaaaaaataggactaagaaagaggcaaattgtgtctaaataattaaggggtactaaggaccctctcctacttttttattcatttagttcttcaattaactcaaagttctttctttatctttaaagaattctgccttccttaaaatatcataaacagttcttgtaggttgagcacccttttcaaggaaatagagaatagctggaacatttaaacaagtttgattctttatcggatcataaaaacctacttttcgaagatctcttccttctcttcgagatcgaacatcaattgcaacgattcgatagatagcttattgggatagatgtagataaacaacccccccctagaaacgtataggaggttttctcctcatacggctcgagaaaatgattcgaatttctgtctataatgcaaatagatag

SEQ ID NO: 462271 - DNA, 623 bp, Sorghum bicolor
tatctacctaaaatgagattagttgatttgtattttgtattctatccatgttctatatatttaataagaagttcttactttttctgttctttggaaaaatcgaacacacgatgctcctatttctttatttcattatgagtggtatgctttcgacaataacgacaaaattttcttaattctaattgtccgggcgtattgtggcgattcttttgagtactatatctagaaatccccgtcgattccttattggtaccctttcgaacacaactaatacattccaaaataactcggattctaacatctttgcccttggccatgaacctcctttcctttttggatcgacttaacttaattcttatacctattcttttattcttttattttggatcccaagaaaagaagaaggataaaatccatagaagttcctaactaaaaatgtgatttctaaagaatttgttgtaattcttcgaattctcgaacaaatccaattccatagaataaaaaaaattggaaattcgtaaattcgtaattaagttataaaacatagagaaataattaaagaatacaatccttatcccatctttcttttctttttgcttcatatcctaaaaaagaattcaaaa

SEQ ID NO: 462272 - DNA, 486 bp, Sorghum bicolor
  unsure (1)..(486): unsure at all n locations
gggaaagttacaggggagggggtcttttcaatttcnattatctatatattagttcgtttctatttctagatatctatttctatatatctatatattagtattaatatctatatattagtattagttatctatatattagtattagttagtttttctatgcgggtgttgggcgatcccngctctgtnagttctttcttccctgatgaactgtcggcaccagtcctacattttttctctgtggaccgaggagaaagggggctcagcaggaagaggattgtaccatgagagaagcacagaggtcaacccgcttcaaatatggaacatggattctggcaatgcaacggagttgggtcctcatatcgatccgaatgaatcagtctttctacagaggtcaatctttgcctattaggcaagaggatagcaagttcgaaattctttctcggtaggaacatgatttctattactatgaaattcttaaattagtta

SEQ ID NO: 462273 - DNA, 618 bp, Sorghum bicolor
ggtacagttgttcatcaataaaaggggttcaggaattggtaaatgtagatataggaccctagaagaagaatactcggacccgagaggaagagtatatggactcgagaggaagactcagaagacgaatatgaggagcccagagaacaaatataggacccgagagggagagggcgaatatgaaatcctagaagacgaatataggactctagaggacgaatatgaagacgggagaagatgagtatgggatcctagaggacgaatataggactctagagaaagactcacaggaagaatatgggagcctagagaacaaatataggacccgagagggagagggcgaatatgaaatcctagaggaagactcagaagaagaatatgggagctctgaagatggctcagagaaggaatatgggactttagaagaagactcagaggaagactcataggaagactcagaagacgaatatgggagcccggaggaagattctatcttaaaaaaagagggttttattgagcatcgaggaacaaaagaatttagtctaaaataccaaaaagaagtagatcggttttttttcattcttcaaaaactgctatcttgccgagatcctcatccctaaa

SEQ ID NO: 462274 - DNA, 630 bp, Sorghum bicolor
cgtatcataaaacctattagtgcaaaagctccatggagagcgacaaaagtccaaagaccacctaattgacaccaacgagtaaaatccccctgtgcttccggtccccatagtagcaacaaagagtgtgctaaactattggcaggtgtggaaaccgccgcggttaagaaattgcaaccttccaaataggaactagccaatccatgggtataccaagaagttacaaaagtagtccctgtaaaccaaccccctaaagcgaaataagcacaaggaaagagcaataagccggaccatcctacaaaaacaaaacggtcccttcgtaaccagtcgtccataatatcaaatagatcgttttcttctttagtaactctaccaacggctatagtcatagtgatcctcctattcaattacttcaaccattttcgagcacctcatattacttccagggcatacgatagtttgattatctgtggacgatttctttctcgttcaatgccctttttcagtcgtctcgaagatagaaattttgcatttttatctatggggtcacaaccaaggtcgtgctaaatccacgaatttcatttaattcatttttcttatactattgaaaagaaattaaagaaaggaataaag

SEQ ID NO: 462275 - DNA, 618 bp, Sorghum bicolor
  unsure (1)..(618): unsure at all n locations
ttattgtcaactttgtgttaagaagataaaaaccaaaaaagcttgccttcctctcttggtaaatagagagggagggcagagtcctttggtgtcccttccagttaagaattggggcttcacaattactagccaatatttctctcatgccttttctcgttcatggttcgatattctggggtcctaggcgtagaggaaccacaccaatccatcccgaatttggtggttaaactctactgcggtgacgatactgtaggggaggtcctgcggcaaaatagctcgatgccagaatgataaaaagcttaacacctcttattttactttttcactattttgaaatacgaaaaagatccaaatccaaaacgcaaaggtcgtcttattcaaaacctcaatcatcccctctctcccacttcacacctcagaacgcactgttcttatagagagaaaggcgctttcccatcttcttaacccgaaatgaaatggctgaggagaagaaggttccttttggggggtatccccgggaagagatccagtggagacggggtgggcctgtagctcagaggattagagcacgtggctacgaaccacggngtcgggggttcgaatccctcctcgcccaca

SEQ ID NO: 462276 - DNA, 607 bp, Sorghum bicolor
cataacaggaattaattagaatattatattctaagtatttcgtttcgtctaggaacgagaggctgaaaatattcctttactttaataaaatctggaattgtgttgtataagtgaacatgaatttattatcactcaatgagcatcttgtatttcatagaaattgggggttatatagtccttacgtaagggccagcctatccaactgtggggcgttaagatacgtttaagacgtggatgattatcataagaaattcccaccatatcataagattcgcgttcttgaaaatcggcacttctccaaacccagaaaacagacgggattctaggattatccttttgggcaaagacttttatgcatacctcttctgggttatctataccatactgtattctcgtaagatgatacacgctagctaaagatccaccgggtgctacgtcataagcacattgggaacgtaaataattggtaccatatacatataaaatgacagcaatggaatcccaatccccccgttttatttgtaaagtctcgactcctcgatgatcgaagcccaaagaccctatgaccacgtcatgtttaactagccaattagataaccaaccctgc

SEQ ID NO: 462277 - DNA, 558 bp, Sorghum bicolor
cctatgatcgaagttatatactatataatttaggccttatatacacaagcaatggagagcatacaaaggctttggaatattatttccgggcgctagaacgaaaccccttcttaccgcaagcttttaataatatggccgtgatctgtcattacgtgcgactatctccactatagaaagaagaaaaaaagaaaggaggaggttttctagtgaatactagaaaagagggctttctacatagggatcgtcaaaacaacgattttaccctatcagctgtaggaaggaaggacacttcacgagaatcaaaataggaagaaagtagagcctatactactattctatggataaagctgaaattgatagagaaaacaccgtaaagatcaattagtgagcgactgggtcgatacaactaaaaaaaactgcttcattataccacgatatgggacaaaatttaggaatccgcttatgtaataaagccgatccactaagggattaagcagcggtgtagtatcagatcccaaagatagtagttcttttttttttcttatggaaaaggtcttt

SEQ ID NO: 462278 - DNA, 620 bp, Sorghum bicolor
ctaattcaaaaccgaacatgaaattttgatttcattcggctcctttgggggttgctgaccacttaacatctatgtcagcttttctgtctgaatggaaccaaagctctctgctttctagatgatccttatagagtaggagatagaaattctcctaaatatctatctaatctacttacttcgttccctaatttcattggggggagcctgaggaaaagagttgggtttccaccgagctgaaacaatataatatactgatggttctagtaaaccaaaaccatcgttttttagctattgggcttccatttcctacaaaacaaaagaagatttagttacgattggaaataaacttttttgtatcttcatccatagatcctttactcatatttattcaatcggaatacttatcggaatacttaatccaatgcaaaattttgcttcgcgactacgtactcataatcgaatttgtattttagatgcaaattcaattagtctttggatactaatcgcgagaatgtatattcttcctcaatatgctattgagaggaaaaggattaaaccctttataagaactaaagttttcatcggaatatgaatataaaaaaacttaaggatgccttaag

SEQ ID NO: 462279 - DNA, 681 bp, Sorghum bicolor
  unsure (1)..(681): unsure at all n locations
gtacagctgntcatcacttttgtttcttctcatcgagatagaggcaggcaaaagagggattttcgtcgtttgtggatcactcggataaacgcagcaacacgggtatataacgtattcaatagttatagtaaattaatacacaatctgtccaagaaggaattgattcttaatcgtaaaatgcttgcacaagtagctgtatcaaatccaaataatctttacaggatttccaataaaataaggactatcaattaaaggataaaaaagtaatatacaggaataattaaaaccgaattcccggagagggaactccgggaagatacaataaattaagattaagtggtaggaatcaacgagcatgttgcaataaataaaaaaacaatttcttttttcccatttttcttttttataacaaacacaagaatcaaaattggattactttctttatatatgagtctgagcctttcgaataaaacatcaacaatcggaacttaagttccgattgttgtttcttaaattctggttggagtttcttaagtttcgattggaattgaacttttgtgttaattgaggaatatgtctattttttctgtgtctaggaccagtaattattgaaattgcctgggcttgaaattgcttctcattctcatagttacgaaatggtaagaaagataaaatacgagc

SEQ ID NO: 462280 - DNA, 662 bp, Sorghum bicolor
agatacattgactttctattcaaaaaaattagtggatccacttaaaataaaaaaaaactcgctatagtcggctacgcatatgcatgcatttatgctcgtagcttatatctgcatccatagacgttttcatttgtgtgtagaaagagctacataccctatcatattatactacttacacaaaaaaatatctgtattatgatcctggaaatacattgagaaaatttggccccgtcgtttctagacaatcttatttttctgcacataaagaaataaggaagtcattgcaattgccggaaatactaagcctactaaaggtacgaaaatagagggtaagttaagatctgtcatagaatatgtgtctcaattcaaatttactatttctatctattcgaaatatatcttaagattcttatgatataattaagtatatctattataaggaatattgactattgtattttttagtttaaaaaataagaaaattgcaaaaaaggggaactaaaaaggggaactcattaaaataaaatgttgaatttatcttttcccattctcatcgcctttctatccttctaatcgaacttgaaattggattcaaaagaaagctattgtgaaaataaaagaaatacctctttcagaatacccttgatttaaagggtagaagt

SEQ ID NO: 462281 - DNA, 316 bp, Sorghum bicolor
  unsure (1)..(316): unsure at all n locations
cttttcttgcccgctttcccttgtgnntgccgtttctttccgngnggggggtccctntttttngnntttttnttttgtttttgtgtttcgccgggtgtggnnctttcngnntggnnnntgtgcnngttttntcttggtgtcgntcttttcttgttttttnttttgtcttttggttnnttnngngtnngnggtttcnccnggtcnttgntnccggnttnntntccnnntnccnnntncgctcnctttgtgnntcctggnnngnnnngtgnnttgttttggttttggtggcctcnnngnnnnccttgctcttcttccg

SEQ ID NO: 462282 - DNA, 586 bp, Sorghum bicolor
catcatctcctattgtaagttgatcatacttccatgctagcttatatcgatgaaccccatgggtaggggggcctaataaaggtatggccgacatacttctccaagaaaggatctaaatccatatcccctaattgtctctacatgaccaacatactactcctggagaaccctgttaaaacttgatggcacaaagaacgctttgttataagaaccaatcgagggggggggcctttgctacacccaaacaatactcctgcattaattcatccaatcctaagaatatctgataatgtctcatgaagttactatcacaacgatataaagctaacttaactctaagcacaggcatataatacaccctgccaacaatccgaggctataacatagatcacgttcaatctaaaggatctactgcgggataaatacccttgcaagctaatcctctggaaagtacaagtggaaaacgtccaaatgtgcaaatgtcatcagcaagagcaatgacaaaacaaatcggctgacatgcatcaacagctaatatctaaggtatacacccacttcactatagaagtaattcgcatctttcaag

SEQ ID NO: 462283 - DNA, 427 bp, Sorghum bicolor
  unsure (1)..(427): unsure at all n locations
actttccnggagaaccggtttttacttctgccctaagggcggtggggataaaaaccactcnatttttcntgctcttgctacagttaaaccatcctcctccgataattcatccaatccaagaattgcgataatgtcctgaagttctttgtaaccttgtaaagtttccttaactcttttctcantgggatagttttggnnnccaacnatcctannctntaacataattnannttnaatctaaannatctactncnnnataaatacccttnnaacctaatcctctnnaaantaccccantancntccaaatntccaaatnttntnncannaccannntcnntcaaatcntcttcanntacataaacttcttnnatctaanttatanatccctttttnntanaaataattctttctttcaaaaaacccatt

SEQ ID NO: 462284 - DNA, 596 bp, Sorghum bicolor
  unsure (1)..(596): unsure at all n locations
gtacagttgntcatcaagaaaacggattcttgaacctctttcacgctcatgtcacgtcgaggtactgcagaaaaaagaaccgcaaaatccgatccaatttttcgtaatcgattagttaacatggtggttaaccgtattatgaaagacggaaaaaaatcattggcttatcaaattctctatcgagccgtgaaaaagattcaacaaaagacagaaacaaatgcggggttggttttacgtcaagcaatacgtagagtaactcccaatataggagtaaaaacaagacgtaataaaaaaggatcgacgcggaaagttccgattgaaataggatctaaacaaggaagagcacttgccattcgttggttattagaagcatcccaaaagcgtccgggtcgaaatatggctttcaaattaagttccgaattagtagatgctgccaaagggagtgggggtgccatacgcaaaaaggaagcgactcatagaatggcagaggcaaatagagctcttgcacattttcgttaatccatgaacagaatctaggnatgtagacacatggatccatacctctcgagcggaaaagaatcaattgaaggagaatc

SEQ ID NO: 462285 - DNA, 634 bp, Sorghum bicolor
gtccgtagcgtctaccgatttcgccatattcccattttacttttctttgaaaccaggattccttgtataatttaatccatcttttagttttttttgaatcattgaattcattattcgacgtagtctagcaactcatctttatttgagacaccccgctcgcttattgcaattcagaattgaattgattttatcgggggtggtgtttgcaattcaatcggaatgaatatatccaaaagtttttctctctcccgcctccctccttccttttttagagtattccaaatcatactataacgcttgatattcattctttttttctaagctgaattagaaatttcatttgctatgattctatcttctccttagtgaactatttatccttaaattattaacaaataaaaaaaacaaaatatctcaaaaatgtatataatgatcaaatgaaaatgccaatctcttggcattttctctttattatattatgcatatatattcttcttttctatgtattagattattcgtccgagccatatcaaattgaaaatatctgaaatcaaattcaatatagaatttggaatagattctattagaaaaatccatttggcgaattagagaaataaaaagaaagttcaataaa

SEQ ID NO: 462286 - DNA, 565 bp, Sorghum bicolor
gaaaaggtcccatgatcccgagccggtcttatcttggctcgcaacgcgaggggggtctatgaagagctaatctaattgtattagtttctataatggatttcttatgtggaatactaatggatagggcctcgttgctaagtgctacaagatctagtgcactggaactcgtggttatggacccgaattctttagtatggggcattgtcttttccaagtaaaaacccctagtatatgaaagaatgaaaaggtgctttcgttcttgtggaataagaagccctcgtaccttaatgaaaggaaaataggaatttttcgttaggtatttgaccaaataggatcgtccagttcctatagaacctatcactaaaatacccgatagggctaagcggaacgaaaagggttttccatgagatggtaaatgaaaacgattagccccacacgaggtttgggaataagtgattggctgataatgagcaaggaatatacgtctttctgctaaagaggatctatttaactcataattcattagatccttgttagcaatgtcaactaggtatcataagtaaat

SEQ ID NO: 462287 - DNA, 643 bp, Sorghum bicolor
atccgataaagtacttttctactaaattcattcatttcttttttgaaaatgtctccattttttttttttgcaattttatgacttagtttaatgcgagatgcccacatttttggtctgaacactaaacgaagcacagagttaaaattgcaaaaaaaaatgaaattggactctttttcctgttatagcaatcaaatcaatacctgtactggactaatttagattcctttttattagtctattcttattctataccctttaaacgaatttccttaaccttaaaaagcttaaaaggtaggggatgatccgtgaattaacctaaccatcaactaaaaaaaatagcataacagaaaagtagtaaagactcttttctttgatctagttcgaagagtatattgacaattccaaaaaactgctcatactatcattatagtataatgacgagtggttgtatacggtgctatcgtctagtgatgcccccatcgtctagtggttcaggacatctctctttcaaggaggcagcggggattcgacttcccctgggggtagggagtattataaaaagaggttaatcatagattatcaaaaagcctagaataaattcttcctgggtcgatgcccgagcgggtaatggggacggactgta

SEQ ID NO: 462288 - DNA, 659 bp, Sorghum bicolor
gtacgtatttcatcacaatctattggctaattcgaattagtatgtagaattcgtataattatgactgttgaagccttaaattcaagtctcttggctcttttcacgctttctcacaaacagattacgaaatatattgcattatttgttaaagtttggataaaccattgcttcgtctggtgtctacaatacatctaatttatatagtactaatttcatttttaccagatcgaaaatttttatgttgaaaaggcaaatttagagatccaatgtcacattctgtaaaaatttatgatacatgtataggatgcactcaatgtgtacgagcttgcccaacagatgtattagaaatgataccttgggatggatgtaaagccaagcaaattgcttccgcgccgagaaccgaagattgtgtgggttgtaagagatgcgaatctgcttgcccaacggattttttaagtgtccgcgtttatttaaggtctgaaacaacccgcagcatggctctatcttattgatacgttacaaaaaactccacttgaatcgtctgattcctctttaccgaagaagcctgtgctcgaaataatcgagcatgggcttttctggtcaaaacgtatcttgtctttattactttatcatgagttattttccttggttaacaatac

SEQ ID NO: 462289 - DNA, 661 bp, Sorghum bicolor
aattctttccttttcctagttcttcttccaagcgcatgataaccccaaggggttgtgggttgttttctaccaatgggggctttcccttcaccacccccatgggggtggtccacagggttcataactacccctcttactacggggcgtttacctaaccaacacttagatccggctctacccaaacttttttggttcaccccaacatgggggacttgtccgactgttgctaagcagttttgggataccaaacggacctccccagatggtaatcttaaagtggccaatttaccctcttttgcaatcagtttcgctacagcacctgctgctctagctaattgcccaccccttccacgtgtgatttctatgttatgtatggccgtgcctaagggcatatcggttgaagtagattcttcttttttatcaaaaaaccccttcccaaactgtacaagcttcttccaaagcatacggctttctagatgtatatgacgatctctagacagatggatcttatatgaatcgtatgatgaagtaccacatgagtggatatatagaaaaggaatccaaatccgcccaatcgctcatgttatgatcttctacatcctaagtctccgcgttccgtcatctggcttatgttcttcatgtagcattcagatcgaatgac

SEQ ID NO: 462290 - DNA, 641 bp, Sorghum bicolor
  unsure (1)..(641): unsure at all n locations
ttgaatttatcttttcccattctcatttcctttctatccttctaatcgaacttgaaattggattcaaaagaaagctattggtgaaaataaaagaaatacctctttcagaatacccttgaatttaaagggtagaagtggaatagaatacccagttgaagagtaatgatcatacgtctgtaatgcattgtatgtcccagggtaggtcccattcttctaccctttccgggtagtcgatggctattcacagctactaccttaacaccaaagaagagttcgacccaatgctttatttctgtcttagtgaatcccgattcgacattaaaagtatattgattctttcccaataaacgaagactcttttctgtaaatactgcgtatttgattccattatcgtacgataatactatatttttatttatatttgtttattgtattatacctttctatattctagatatatagaatagaagaatctcgatttgtcaaggctcatgatcgtatcaagatctatttaaattcggcttaattttttctaaaaaaaagactgagccnaatttaattgcaattaattagaagaataaagaagaattactggatttctaaacttattttttctctttctatttttcttctttttaatt

SEQ ID NO: 462291 - DNA, 515 bp, Sorghum bicolor
gtacccttctatccaaatccaatttgctttcgataaaataaatccgggttgcagattccagcagtagatgaataattgcaaatttttgtgtgtacgagattagaataacttaaaaataactgacataattttttatttttcctgatcagaaaaatacatgaaaaagaaaggaggtagaaaaatttgttgatttatggggggggaagaaaaacaagaaaacaggggttctgttgaatttcaagtattcagtttcaccaataagatacggagacttgcttcacatttagaattacacaaaaaagatttttcatcggaaagaggtctacgaagacttttgggaaaacgtcaacgtttgctggcttatttggcaaagaaaaatagagtacgttataagaaattaatcagtcagttggatattcgggagaagtaatttaatcgttcgaatttttttcctattttattagtagtcttataagtatcttagattttgcattttgatgagcctcgttttgagg

SEQ ID NO: 462292 - DNA, 555 bp, Sorghum bicolor
gttacgattctaccagatatgtctttttgattccgcgaaaatcgagttacagggtaggcgcttatgacctccccctctatgccttgcggtaatgattcctctggcattacgacctttaccacaacggtgccgtccatggatcaatttatttcgtggattggatttcacttgcctgtctacggttcccttgcggatagtcgggataggtgttttgtataaatgtttcgccgtattattaagtattctcctttagttcgtttctctatctagaagtggaatagaataacccggttgaagggtaatgatcatacgtctgtaatgcattgtatgtcccagaataggtcccattcttctaccctttccgggtagtcgatggctattcacagctactaccttaacaccaaagaagagttcgacccaatgctttatttctgtcttagtgaatcccgattcgacattaaaagtatattgagtctttcccaataaacgaagactcttttctgtaaatactgggtatttgattccatccataaatcgactttccctcctatgctc

SEQ ID NO: 462293 - DNA, 620 bp, Sorghum bicolor
  unsure (1)..(620): unsure at all n locations
tgtaataccagaaactaaanatactatgagtatacaaatattgtggaactctttctangatattggtctaggcaaagatttcttgagtaaaacctaaaaagcacaggtaacaaaagcaaaaatggacaacaggattacatcaagctaaaaatactctgtacagcaaaggaaacaacaaagtgaagagacaacctacagaatgggagacaatttttgcaaagtcttcaactaatagggaattaataaacagaatataaaagaactcaatttaataacaaaaagccatgaataatctgatttaaaaatgggcaaaagatctaaatagacttttctcaaaagaagacatacacacgttgccatcaagtatgtgaaaaaatgctcaaaagcattaatcttcagaaaaaattgtaaattatagccacaatgagatagcatcactgtctgggttaaatgactttatcaaaaagagaaattctaacaaatattgctgagggtgagaagaagagtgaacactcatttaatgttcgtggtaatttaaattaatatggctattgtgaaggagagtatggaagtgtctcgaaaaagtaaaaatagagttattatatgattcatgaatccta

SEQ ID NO: 462294 - DNA, 565 bp, Sorghum bicolor
gtgagcaaatagaattgcttgactttttcaattaagttcaactttgaacttacagaaattttgtaaaaaaaaatctataccctcccatggaagggtggttttgatttttaggctagttgagtagttttgattaaggttttattagtttattactctaaactaaatcaacgatttgcaggatacttccttcatggaataaaatactggatcctctcccctctttcttgttgcttcataagagtgaatccattttatgggcgaaaggcgggggctttaaatcgaccgatggattgcttcactcactaacatcattaacaaacaaaagaataaatagagggattccaaccatcagagcaaaggttttctctttgttatttttacaaatagaaataggtaaccaatttctagattatggaataaaaccgcgttataacaataagaattccgcgggccctttccgctctaatcagataaaggggagtaaggacccgctaagttcctactttttcatgtttacaatctggatcctccgattactatagagatgaacccaatccagaatacg

SEQ ID NO: 462295 - DNA, 500 bp, Sorghum bicolor
gaacttaaagaagttttttggaggcccttttcctcattactcctagcagtgagggggctggatatttaccttatcaactagcaaatcaataggggttctatttgagtaagcacctgaattggcacctgaatcggactgaaccggctgtttgtcattgtcaggctactgttcttctattctttcgaattcatgaagggagggatggattttgcaacaaggtcaattatgttcattgcataataagttcccttgaaaagcattggcgcacgtgtaaacgagttgctctaccgaactgagctatagcccttgtcagagatatcttaacatatagataatttcttgtcaagatgaatattctctaatgccagaggatatccctttcatccgtttactatataacataaacataccaataacggaataacataacataaacataccaataatggagcgggattgcttataaaaaggattcaatctataatcgatcgaagtaatgg

SEQ ID NO: 462296 - DNA, 631 bp, Sorghum bicolor
  unsure (1)..(631): unsure at all n locations
gtacagttgntcatcaaagggctataacaaaaattgcgaaaatgtctccttttaattggcgactatcaaatggatcagaaaatgttacgagatttagattaattgaattcagtataagttcaagacatattagagctctaaccatgtttcggcttgtgatcaatccatagataccaatcgaaaataaatagacactcaaaaaaagtacatgctcaaacatcatggactaactccttatcaatctcgattcatttcaatatgaggacaagaattgaaccgattcaattaattagaatagaacaattacacaacaaataccttcttttctcttttgttgtgttggcagtagatgggttttactaaatcaaaattgtgattctttagttatttattttatatttgaaattctaagaattttgactcattctaagtatttcttattgtcgagccatagtaattgcacctattaaagaaactagaagaattagggaaatgagttcaaacggaagataaaaatcggttgctaaatgaatcccaatttgttgaacgttatttatgagaccctgttctactatttggtttgatcttgtagtccanagaattccataccacgacgtatctgggatagtag

SEQ ID NO: 462297 - DNA, 556 bp, Sorghum bicolor
  unsure (1)..(556): unsure at all n locations
aatcctacgagctttcaaatatttgtccttattcattcntttaagcacgctaagggatagaagaccatatcaacaggtgttccatcttgcaaatagggcatatcttgcctaggcaaaattttggaaatgatccccttattcccgtgtcttccggctactttatccccaactttgatttcacgtttttgtaaaagaggggggcgaaccattatgtcaaaggggtccctctggatccatttcacatcgataacgcgccctcttccacctataggtagtttgagagaagtttcttttgaagtggatacctcaagaccaaaaatagcccgtaataatccagcttccgcgatatacgacgattcgctcgctatctgaggcgttaatttacctactaaaatatcgccagtttctacccaggatcccaacctcacaactccatttctgtccaaattgcggagtaaatggtcttctagatgtgggatttgtttagtgattttttcagcggaaccctggcttgtcgtatccgtctgaatttcatattttcggatgtgaaaagaag

SEQ ID NO: 462298 - DNA, 485 bp, Sorghum bicolor
  unsure (1)..(485): unsure at all n locations
aaaccccgaataacccaacgagagactaaaaatttttttatagagaattaaggggctgtgagtgccttaatcataaccaatcacntaatcccctaagttcacgaactaataaggttatcaaatgaatcgtaatcacaattgaaatggttgagaaagagatatgagttagtatatgttctaaagttgcaaatatctttactataagggggggttacaaaattntaaatttcnaattgaatccattttctaattaattgtattctttttccaaaatgccnccactcnnattcnaaccnanatccttnaccactgcttcctaanaccancntntctaccaatttcaccatnncnnctaattttaaataatanttaacttaaaaaaataatanttattttatcntaaatcntccaaactnnnaaaacctatanaatttaaaaacattanaanttcatcattaactacaatnaaatnaattttntatttt

SEQ ID NO: 462299 - DNA, 470 bp, Sorghum bicolor
  unsure (1)..(470): unsure at all n locations
agtgatggagatagacggtttaaacaaaattagacccaaaatttcaggcacggggtntggaatcacagagaaaactacaaacaaaaatgagtgaaaattagcttcgttagggagcccnatccaagattggttgtagacccaacgaattagtagttcccaaccgcgggtggagtgaaatccaacaaaaaaatcagtatctaaaagagggggggaggcttttattgaatcatttaagttataaaaaaattcctgaacccaagaattcaaaatgacaagttcttctttacccagaaaaaaagaaccacttagaatagccaaacagattatatttgttgagaaatgcaaaatgatatggagatgatcctcattatctattttggccaattgtattatttccttgtgtattcctataggaagtttttgtacatgtgtcttcggtttctcttttatcatttcgtccaagagaaaaa

SEQ ID NO: 462300 - DNA, 577 bp, Sorghum bicolor
  unsure (1)..(577): unsure at all n locations
ctttttcgaaacaaataaaggaaaatttagagaaacataagcatggtcaagtaagccctctcnnnggcttgcttaagaataagaaagaggaatcttatggaaatagcatggaataaggtttgatcctattcatggggattccgtaaatatcccattccaaaaatcgaaacaatcgggacttttcggagggttgctgcagttactaattcatgatctggcatgtacagaatgaaaacttcattctcgattctacgagaatttttatgaaagcgtttcatttgcttctcttcaatggaagtttcattttcccagaatgtatcctaatttttggcctaattcttcttctgatgatcgatttaacctctgatcaaaaagatagaccttggttctatttcatctcttcaacaagtttagtaataagcataacggccctattgttccgatggagagaagaacctataattagcttttcgggaaatttccaaacgaacaatttcaacgaaatctttcaatttcttattttattatggtcaactttatgtattcctctatccgtagagtacattgaatgtacaga

SEQ ID NO: 462301 - DNA, 686 bp, Sorghum bicolor
gtacagtttttcatcatcctctcttttctgtttgtatttctatatacccaaacttatataagactagatgaatattaagaggactcttccaactagataaaaatctatcatggtcagcaaagttgtttctttatttgtgtttgctctgttagttaataatttcaatttcattaagaaaaacaaactaaataaatggaaaataaaaattgatagaattccttttattttttcttcaaatccaaaaaatttctctttttttttatacataggtcgtcgatttggcattggaaaaaggactgcgtgcccttctagtaaatagttcaaactattttatcgatatgagtgttctatatcagataaattctacactagctatttcccgtttaaagcatttcgagactaatactaatactaatgtagttgtagaaagagtacccctttttgcccggacttcaagcagtttagctttaaccgtgttaatggtctcacattattggtctatagagaatcaaagtaaatttaccaatgaatctcgaaatgctatggttcttccatatgatttctgaagttattcagaagtaattcgtcgagatcgtgcaccttttcttatttatcaaaaaaaaatactaaaaatattctaaagtgcagccggatagatccaatctattcttgaaatagacaactcg

SEQ ID NO: 462302 - DNA, 656 bp, Sorghum bicolor
caagtctgatcttttctcccaccttcagaagaatgaatcatagatagacctatatggttcgggcgaattttctgaaaggtaactatctcggtttcgtttctttcatatatgaaatttctatagaatcctggaaaaagacctttttccataagaaagaaaaaagaacttactatctttgggatctgatactacaccgctgcttaatggggtagtggatcggctttattacataagcggattcctaaattttgtcccatatcgtggtataatgaagcagttttttttagttgtatcgacccagtcgctcactaattgatctttacggtgttttctctatcaatttcagctttatccatagaatagtagtataggctctactttcttcctattttgattctcgtgaagtgtccttccttcctacagctgatagggtaaaatcgttgttttgacgatccctatgtagaaagccctcttttctagtattcactagaaaatttcctcctttctttttttcttctttctatagtggagatagtcgcacgtaatgacagatcacggccatattattaaaagcttgcggtaagaaggggttttcgtctagcgcccggaaataatattccaaagcctttgtatgctctccattgcttgtgtgtata

SEQ ID NO: 462303 - DNA, 662 bp, Sorghum bicolor
  unsure (1)..(662): unsure at all n locations
cgttcttcctttcaggaagggaggattatggaagtcctattgattgggggttgctgcagaccgccaanaaaagcatgaaaaaaaggctcgaatggtacgatccctccgtcaccccagaatgaaaggggtgatctcgtagttcttggtctgtgaagatgcgttgttaggtgctccattttcccatttaggacgaacgggggggtgtgctcnagagatagctctccatacactgataagggatgtatggattctcgagaagagaggagccgcggtggccccccccccggaccgcccggatcccacgagtgaatagaaagttcgatctacatgggatctcacctgaatcgccccatctatcctcctgaggagaagtttgtttggtttcaaactccgattcaaacaggaggagtacgccatgctaatgtgccttggatgatccacatcttcgggtcaggcgctgatgagcacattgaactatccatgtggctgagagccctcacagcccaggcacaacgacgcaattatcaggggcgcgctctaccactgagctaataacccgtcgcgcgggccttccaaagggaggcctgctaccccaaaagcgagaaaaactccatccctttccttttgacatccccatgccgccacacggggggacatgggga

SEQ ID NO: 462304 - DNA, 608 bp, Sorghum bicolor
gtacagtttttcatcattttatttttcctgatcagaaaaatacatgaaaaagaaaggaggtagaaaaatttgttgatttatggttaaagaagaaaaacaagaaaacaggggttctgttgaatttcaagtattcagtttcaccaataagatacggagacttgcttcacatttagaattacacaaaaaagatttttcatcggaaagaggtctacgaagacttttgggaaaacgtcaacgtttgctggcttatttggcaaagaaaaatagagtacgttataagaaattaatcagtcagttggatattcgggagaagtaatttaatcgttcgaatttttttcctattttattagtagtcttatagtagtcttagattttgcattttgatgagcctcgttttgaggaattcatggaataatccattttcatggaataaagaataagaacaaggatatgagtctatcgcttaaaagaaaagatctcatgatagtcaatatgggtcctcaacacccatcaatgcatggtgttcttcgactgattggtactctcgatggggaagatgttattgattgcgaacccatattagggtatttacacagaggaatggaaaa

SEQ ID NO: 462305 - DNA, 643 bp, Sorghum bicolor
cggtcctacttattttcattgtcttcggaatatgtagaataattaaattggggtggcggccaagatcttgggaaaacctaagttaatgattaataagataaagaatttaggaaggatattctcatattgacgcaatacaaagataagtatatgcaaaatctatccctttttagttaaaggaatttaattggttagcatagggggggggtctaataaatagaaaatcgaatagtggataatccgttatgaaagaaacggaatacattctttgaagaatcaagattcgtaatcaatccttgtcttgtttgttggattaggtctaactttcttgaccaaacagcaagcatggaactttacaagaagaacttaaaagaaaaggataattgaagtaacttcgaatcaacttttgttggggttcaaaaaacgaataaaaataaaaaaaaaagtaaattcaaggaatagttccctttttgagggggccccttgggggtcgtggaatgcttttcttctcctcttattccatatggaatacaatgagttaaaataagaaggaataggggaatattcgaccgtttgctccaaaaagaggatgaaatccatcctattaaaaaagaaataatccgaaatagaaagaatttttttt

SEQ ID NO: 462306 - DNA, 430 bp, Sorghum bicolor
  unsure (1)..(430): unsure at all n locations
ttggctttcgcttcccttggcgcggncctgggcgggggggtccctgtcnngtntccgcctgggnntctgttttcttnggtcttttctggntgtccccttctntttcggtggtcnttttcnctttcngttggtttttgttttcggntgggtggggtgctntnngtgntcttgggtttgtncctcntttcncnggggggggctttgcgccgngttcccttccgnttnntggttggcttcgngttttcttgtgggccccggcttcccnngtnnttcngtcttttggttcctccttttctgcttttggtctttttttcttnggcgcttcttttgtctgggctttccgtttnntgttttttttcngcggccgtggtttttggccngnnctctttgnttctttcgtttgggctccttccnnttnnnngttgctcct

SEQ ID NO: 462307 - DNA, 669 bp, Sorghum bicolor
gtacagttgttcatcacagtatatgggaggtatatcccattccgaaatgatctattaatctgctaataagccgtttcatagcagttccgtctatctctttattatgaaagaccaggttggcccgttctgccatacataagtacccccttttttggctgagtaggattcgacaattgctgagtaggattcgacaatgggcctgagtcagtgattcgaaaactttatttactccctttcctcaatctcaatctggatttgcgcggcaaaaaagatggtactagcgaaatcggaatgccccccgaaaggggcatcgccgaatttcacttccttgtttagatagtgtatgaataggcccgactaaatccttgtatggcttcctctatttctctataaaaagaaatatgaccaagagtggttcgaatgtatatagaacggatttctttttttctatttcccactactagatagtgggcataaatctcatgataagtcccaaaagattcatattgaacttcaatcggaacttctcttgacccaacgatgcgttgatctagtttccatcggagccacaagggactgtttaaaccgattcgtttctgtctataagctcccagtgcatcataggaactagaaaaatggggttctttatctttcggatacttataataa

SEQ ID NO: 462308 - DNA, 626 bp, Sorghum bicolor
catcacaactttttcagaacaggtccgagtcaaatagcaatgattcgaagcacttctttttccattacactatttcggaaacctaaggactcgatcgtatggatatggaaaatacaggatttccggtcctagcgggaaaaggagggaaacggatactcaatttaaagtgagtaaacagaattccatactcgatctcatagatccctatagagatgctgtggaaagccgtattcgatgaaagtcgtatgtacggcttggagggagatctttcctatctttcgagatccaccctacaatatggggccaaaaagccaaaaaaataagtgattcgtttttagcccttataaaaagaaaacggattcttgaacctctttcacgctcatgtcacgtcgaggtactgcagaaaaaagaaccgcaaaatccgatccaatttttcgtaatcgattagttaacatggtggttaaccgtattatgaaagacggaaaaaaatcattggcttatcaaattctctatcgagccgggaaaaagattcaacaaaagacagaaacaaatccactattggttttacgtcaagcaatacgtagagtaactcccaatataggagttaaaaaaagacgtattaaaaa

SEQ ID NO: 462309 - DNA, 652 bp, Sorghum bicolor
  unsure (1)..(652): unsure at all n locations
tttcagttcgccaggttgtctcttgcctgctcatggattcagcaggcagttcaaaaggttgacctatttgggaatctccggatctatgcttattttcaactccccgaagcatttcgtcgcttgctacgcccttcctcgtctctgggtgcctaggtatccaccgcaagcctttcctcttttgaacctcgccattaacgttaaggctatgccatcctaaggtgctactaaatggaaggatcttatcaacgtccatgaatgcgaaatcatagatcgaactgacgaattggcaaccttcggtgctatcatagtatccgctaagttcacgggctggagataagcggactcgaaccgctgacatccgccacagggtaaaccaccgcctctcaggcctccccgacgggttctaccatagaggacaacgataggcaataactcccccccgaacacagcttacaactttcatcgtactgtgctctccaaagagcaactcttctcaaaatcccaaaacaaaaggtgctgagttggaatcccattctaaggattcttgtggttccggggaatccagctacaggagaaccaggaacggggagctctcccctttttccgcccgactctntgatcttaacttaagaatgctggttttaagaacgag

SEQ ID NO: 462310 - DNA, 586 bp, Sorghum bicolor
atcactgcgaagatgcgttgttaggtgctccattttcccattgaggacgaacctcagggtgtgggggagagatagctctccatacactgataagggatgtatggattctcgagaagagaggagccgcggtggccccccccccggaccgcccggatcccacgagtgaatagaaagttcgatctacatgggatctcacctgaatcgccggggggcctcctgaggagaagtttgtttggtttcaaactccgattcaaacaggaggagtacgccatgctaatgtgccttggatgatccacatcttcgggtcaggcgctgatgagcacattgaactatccatgtggctgagagccctcacagcccaggcacaacgacgcaattatcaggggcgcgctctaccactgagctaatagcccgtcgcgcgggcctcccaaagggaggcctgctacgccaaaagcgagaaaaactccatccctttccttttgacatccccatgccgccacacggggggacatggggacgtcaaaaaggagatcctatcactatcaactaatttgttccgacctaggataataagctcatgagcttg

SEQ ID NO: 462311 - DNA, 613 bp, Sorghum bicolor
  unsure (1)..(613): unsure at all n locations
ggtacagttttcatcaccttttatcaagtagntgggaagaccataagtattcctttagttgcccatcggcgctctaagaaaaatacttgtatgcaccaaaaacctcgggttccgcggggtaaatccattaaaaaagggcaaattttagcggagggagcagctacagttggcggggaacttgctttaggaaaaaacgttttagtagcttatatgccctgggagggggacaattttgaagacgcagtactaattagtgaacgtttggtatatgaggatatttatacttcttttcacatccgaaaatatgaaattcagacggatacgacaagccaaggctccgctgaaaaaatcactaaacaaataccacatctagaagaacatttactccgcaatttggacagaaatggagttgtgaggttgggatcctgggtagaaactggcgatattttagtaggtaaattaacgcctcagatagcgagcgaatcgtcgtatatcgcggaagctggattattacgggctatttntggtcttgaggtatccacttcaaaagaaacttctctcaaactacctataggtggaagagggcgcgttatcgatgtgaaatggatccaga

SEQ ID NO: 462312 - DNA, 698 bp, Sorghum bicolor
  unsure (1)..(698): unsure at all n locations
ggtacagtatttcatcattcttataacgtactctatttttctttgccaaataagccagcaaacgttgacgttttcccaaaagtcttcgtagacctctttccgatgaaaaatcttttttgtgtaattctaaatgtgaagcaagtctccgtatcttattggtgaaactgaatacttgaaattcaacagaacccctgttttcttgtttttcttctttaaccataaatcaacaaatttttctacctcctttctttttcatgtatttttctgatcaggaaaaataaaaaattatgtcagttatttttaagttattctaatctcgtacacacaaaaatttgcaattattcatctactgctggaatctggaatttggatttattttatcgatgcaaattggatttggatagaagggtacattcttttattttagatagaagaaacatttcttctatctaaaataaaagaattttgctgatttatttattgctatatccaatttatagaattgatataccatttaattgatatcatttagcaaaatgaaacacagcatatgcatccatctttgggctcgagaatttcacgggatagagatatagtttaagaaataggctattaagtaactctaaatgaattggggatacatntgtatccttaacatactgaaacgactgccattattcgtatcaaaccaatagcga

SEQ ID NO: 462313 - DNA, 127 bp, Sorghum bicolor
  unsure (1)..(127): unsure at all n locations
atataatagnaaagaatctttaaagtgtggtattaaagaactacatatagtgtgtttgtaccacactattataatccctacattacattatcttttnaataatactactgtaccatctgattaggcg

SEQ ID NO: 462314 - DNA, 542 bp, Sorghum bicolor
  unsure (1)..(542): unsure at all n locations
cgcaaaatggataaaatcgntgcagncattatttgaaagtatagggagacggagagcgtatcctatttgaaggaggatgaaattcagatcaggtaagggatccttccttctattgatttgatcaaaattcttttttcttttcctctctctctgattttcgatgaatgagcctatggtaatgtttttatctctattctaggacgaggcgaccctcnagtctataaacaagtactaaataaggaaaagaaaactatactaaaggaaacataagatatccatcctaaaatggaaaaaaagacgtatatattagggctatacggattcgaaccgtagaccttctcggtaaaacagatcaaacggattattatcgaaatgattcgaactgtttcaaagacccaacatgcatttttctgcattgggctctttcatcaactgatgtaaagatcagttaattcgccatagtttttctttagggaaagataataagatggctccctgtgctctgattgattatttgtcttatgatcctatcaggaacaata

SEQ ID NO: 462315 - DNA, 610 bp, Sorghum bicolor
catctaacgccattgaaaaatgaaattggattttcgggggaattttggaataaaagataaataaagaatttaatttgaaaaaaaaattctttctatttcggattatttcttttttaataggatggatttcatcctctttttggagcaaacggtcgaatattcccctattccttcttattttaactcattgtattccatatggaataagaggagaagaaaagcattccacgacccccaaggggccccctcaaaaagggaactattccttgaatttacttttttttttatttttattcgttttttgaaccccaacaaaagttgattcgaagttacttcaattatccttttcttttaagttcttcttgtaaagttccatgcttgctgtttggtcaagaaagttagacctaatccaacaaacaagacaaggattgattacgaatcttgattcttcaaagaatgtattccgtttctttcataacggattatccactattcgattttctatttattagatattattttatgctaaccaattaaattcctttaactaaaaagggatagattttgcatatacttatctttgttttgcgtcaatatgagaatatccttc

SEQ ID NO: 462316 - DNA, 655 bp, Sorghum bicolor
  unsure (1)..(655): unsure at all n locations
ctctaaaaaagnngaaggagnnggaggcgggatgagagaaaaacttttggatatattcattccgattgaattgcaaatatatcaacgataaaatcaattcaattctgaattgcaataagcgagcggggtgtctcaaataaagatgagttgctagactacgtcgaataatgaattcaatgattcaaaaaaaactaaaagatggattaaattatacaaggaatcctggtttcaaagaaaagtaaaatggggatatggcgaaatcggtagacgctacggacttgattgtattgagccttggtatggaaacctgctaagtggtaacttccaaattcagagaaaccctggaatgaaaaatgggcaatcctgagccaaatccacttttttcaaaaaagtggttctcaaactagaacccaaaggaaaaggataggtgcagagactcaatggaagctgttctaacgaatcgaagtaataacgattaatcacagaacccatattataatataggttctttattttattttgagaatgaaattaggaatgattatgaaatagaaaattcataatttttttagaattattgtgaatctattccaatcgattttgagtaatcaaatccttcattcattgtttcgagaactttaaaaaggggataatc

SEQ ID NO: 462317 - DNA, 539 bp, Sorghum bicolor
  unsure (1)..(539): unsure at all n locations
acagcccaggcacaacgacgcaannancaggggcgcgcgcgaccacngagcnaanagcccgncgcgcgggccgcccaaagggaggccngcnacgccaaaagcgagaaaaacnccancccnnnccnnnngacaaccccangccgccacacggggggacaaggggacgncaaaaaggaganccgaggggggggaacnaannngnnccgacccagganaanaagcncangagcnngggcnnacnncacccnaaacgaaagaagaccnccananccaagnnaagcncagacgnagcngccnncnnnnngggcgngaagcagngncaaaccaaaanacccaanaagcanaagcannagcncncccngaaaaggagggganccagccgcaccnnccagnacggcnaccnngnnacgacnncacnccagncgcaagccnagcccnaggcancccccnccaaaccgggaaggggaangacnncaaacccggccagcccccaaagagagacgggcggngagnacaaggcccgggaacgganncaccgc

SEQ ID NO: 462318 - DNA, 646 bp, Sorghum bicolor
  unsure (1)..(646): unsure at all n locations
gtacagnatttcatcatatcgatggtccaagaccatagatattgatagatagaacttccatttatttgtggaatagacaggtgaagtgagaataccatagctatacttaagagtaaaatactaggaaaagcccatatgcgacgaagattttttgttgctgtgggaataagaaaaagtccaaatcccattgacataataactggaagtgggagaagaggaggtacccaggcatattgatatgtatgttccataagaaaagaaatagcaatttttagtttaaatttatagttcaatttttctctaaaattgtttccgattcaccaaacctattcttatctctttctaaaggaattcaaaaaacaaaataagaaaaagaaaaaatactggaattctggatttttcaaatttctctcattaaaatattccaaaattaagaatgggtttagctacttaaattcaaaaagtgaatcaaagaatttcagtatctagttattagttaaaaaaaaatatatttattaaaatacaaactaatcatttttgtatttctttctgttaaataaaagagctcttgtgtttcgtaattgattgattggattccaaagaaacctatatttataggaaattctcgaatattgcttatttcata

SEQ ID NO: 462319 - DNA, 610 bp, Sorghum bicolor
  unsure (1)..(610): unsure at all n locations
acttcttgtttgcgaatccctgtttgtatcctttgagcgcacgcccataagtggggatcagggaaatcgatcaaacgatcccaataccgtgaaagagaaacttcccagatccagggaagcttatcataaagggcttcaacaaggggttttattcgttctttgagcaaaaagataaagatcggatagattcgaaccgcaattgcgggggtgataactactatgccagcccaaatcatgatcttcaccaacttggatttggttctctcgcgaaaatcgcgagttgcagagatgagaaccctgaaaagcaagatcccgaataagaaaatagaaaccgaggaaaccacaagagtgaagactagtagagtctcatcttttgtcattctttgctcctttttcactcaatgattcattcgaatttcccaaccaaaaattctatatgtctattctatgatatttctatatatatagaatatgatatctaatatgacacccgatttgtcaaagggattggattggtgacttacccattcagtgactttggcactggacgttccaaaaacgggtactatcggatcgggtgaattagagaatagacagaggtccgntggca

SEQ ID NO: 462320 - DNA, 566 bp, Sorghum bicolor
  unsure (1)..(566): unsure at all n locations
atcattaaacccattgataaaaaaaaaggataacaactatggttagcgaataaaagagggtttggggatagagggacttgaaccctcacgacttataaagtcgacggattttccttttactagaaatttcattgttgtcagtattgacatgtagaatgggactctctctttatcctcgtccgattaatccactttttaaaagatctcgggggcaatgaattgaaggatttgattactcaatattcgattggaatagattcacaataattctaaaaaaattatgaattttctatttcataatcattcctaatttcattctcaaaataaaataaagaacctatattataatatgggttctgtgattaatcgttattacttcgattcgttagaacagcttccattgagtctctgcacctatccttttcctttgggttctagtttgagaaccacttttttgaaaaaagtggatttggctcangattgcccatttttcattccagggtttctctgaatttggaagttaccacttancaggtttccataccaaggctcaatacaatcaagtc

SEQ ID NO: 462321 - DNA, 609 bp, Sorghum bicolor
ttggttatatcatggactcgaaaacggatctgaatgtgactgaaatgcacgatcttcacaggtatcacttttcacgatacctaaacctaaaaggtggaatagcgattttcgaaccatttcctataagagaatggtttccattactttgagaaatggattctatatcaaactatagctattgcattgaaggagaaaagaaactaatagaagtcgaagacgcggaatggtagtgaatagagaaaaagattcttctgattttcttgttcctgaaaatattcgatctatctcctagacgccgtagagaattgagaattttcatgtctttcaattctcgtactcgtaattggaaagttacggaaggagatccatcattttgcaatgaaaacaacataaaaaactctggacaatttcgaaatcagaccaagcgtcttaatacatatgcaaaaaaattcattattggcacaccattgattacaagatttagcttttatgaatcgcttttggtttgatacgaataatggcaggcgtttcagtatgttaaggatacagatgtatccccaattcatttagaagtacttaatagcctattcttatacttatatcttatcc

SEQ ID NO: 462322 - DNA, 188 bp, Sorghum bicolor
  unsure (1)..(188): unsure at all n locations
ttcttttttttttttttgnnggttctcgnttgnngcttctcgcnccttttttnngcntgnnngnttcgtnggttttttccttnncctnnttttttttttttgtgggttgttttggncnntnctcnttttttttttctccccctccttnntttctttcnntnnnnnnntttcttcnntttttttnnttt

SEQ ID NO: 462323 - DNA, 517 bp, Sorghum bicolor
aaagcatttttgactggtctttaattgtgggaaacttctcaagttcttccgccatccttgttaatgaatctacaaatccctcgaattggatctgactaaatccgggtattgtggacattccctcatttccattccggagcatttgaatcttaagtttcctatttatagaagaaaaattccattatcagctcactcttcatcaatccctacggatcaatctagcaatcatggaatccatattctgtttactgaatcacatgaaattctagggaactccacatacgtatttcatatatgtatttcatacatatgaatagagacgatttcgacgaaagttcgaatttcgcaggggtcgaaatggaataaaaatgaattgataaaacagtcctagaaaaaaattatgccacttaaactttatgatattctaaaaagattggatagcaaagatttctcgttttatctcctttctatgaaagggataaagccataataatttataagcactagaaaagttgac

SEQ ID NO: 462324 - DNA, 537 bp, Sorghum bicolor
agttaggaatttcgcctaaacaaaagaaatacaaaggatcttgggcaagagtatctgatcatatatgtattccaatacggaaggaggattttcaatgcgggatataaaaacatatctctctgtagcacccgtgctaagtactctatggtttggggctttagcaggtttattgatagaaatcaatcgtttattcccagatgctttgtcattcccttttttttaattctaggtattcctatgcaagagatagaattcttcgtgacatgacgaaaattttccctttttgaattcttttttagtatatgaagcaaaaagaaagaaaagatggataaggattgtattctttaattatttctctatgttttattacttaatttacgatttacgaatttccaattttttttattctattggattggatttgttcgagaattcgaagaattacaacaaaatctttagaaatcacatttttagttaggaacttctatggattttatccttcttcttttcttgggatccaaaataaaagaataaaag

SEQ ID NO: 462325 - DNA, 592 bp, Sorghum bicolor
gtacagcatttcatcattgctattaagtttacaatttttatgatctcttcccgaaccaaacatgaatctttcgattcatttggctctcccgctccttttttttcttttttgttatgtattatggctatttccatatcttttttttatgtaatgagcctatcctctatcctctcttttctgtttgtatttctatatacccaaacttatataagactagatgaatgttaagaggactcttccaactagataaaaatctatcatggtcagcaaagttgtttctttatttgtgtttgctctgttagttaataatttcaatttcattaagaaaaacaaactaaataaatggaaaataaaaattgatagaattccttttattttttcttcaaatccaaaaaatttctctttttttttatacataggtcgtcgatttggcattggaaaaaggactgcgtgcccttctagtaaatagttcaaactattttatcgatatgagtgttctatattagataaattctacactagctatttcccgtttaaagcatttcgagactaatacttatacctaatgagttgtagaaagagtacccctttt

SEQ ID NO: 462326 - DNA, 562 bp, Sorghum bicolor
aaattgttgattaaactccaacatagttttgttccaaatccactagagtccttgtagaatagtcaagtaccccatttccaaggggtacctgttgaaaatcgtttcaacaaatccgtccaaaactttttaagaaaaattaaaaagttttgaactcgaaagtttttccaagagatgcctgctaaaaattgtttgaatctgtagggaaacagataagaagtatatcactgaaaattactatccagccatatgggtatatgaagagcgcaaattcctttataccccacccaattagaattaggggaaataaaacataaatgtagaaagttctcatcataagatcagccaatagaagaaaaaagtccctaattctgcagaacattctgagcacgtgaaaagtgaatagcctaaagataaaaaaaaagtttatcatttttttaacagcagttcttattgcccctttggcctttttggcccattgttgtatccgattcaacaattgatacatatttgttctcctcttaaaaaaaaaaggaactttcgttccgagcttttggttggtgag

SEQ ID NO: 462327 - DNA, 661 bp, Sorghum bicolor
gtacagtatttcatcattcttataacgtactctatttttctttgccaaataagccagcaaacgttgacgttttcccaaaagtcttcgtagacctctttccgatgaaaaatcttttttgtgtaattctaaatgtgaagcaagtctccgtatcttattggtgaaactgaatacttgaaattcaacagaacccctgttttcttgtttttcttctttaaccataaatcaacaaatttttctacctcctttctttttcatgtatttttctgatcaggaaaaataaaaaattatgtcagttatttttaagttattctaatctcgtacacacaaaaatttgcaattattcatctactgctggaatctggaatttggatttattttatcgatgcaaattggatttggatagaagggtacattcttttattttagatagaagaaacatttcttctatctaaaataaaagaattttgctgatttatttattgctatatccaatttatagaattgatataccatttaattgatatcatttagcaaaatgaaacacagcatatgcatccatctttgggctcgagaatttcacgggatagagatatagtataagaaataggctattaagttactctaaatgaattgtgggtacatctgtatccttaacatactg

SEQ ID NO: 462328 - DNA, 577 bp, Sorghum bicolor
  unsure (1)..(577): unsure at all n locations
catcacctatccattagacaatggacgcttctctttcgtattttactctttctttattgttatggtgtctcggaacaagagaaataataaaaaactgttagaccgaaactcttttaggaaagaaaaacaaatccatataccatatacaaatggatgatacatatatcataaagaaggaatatggagcaggtagtcagtatcgaacccntgaccgcaagcttatgagctttgtgagctaccaaactgctctaccttcttagcggggaactggtggataaaagggggttggataggcctctctaccatatctatacaaatagaatagtccacttatacagaatggtaaagagggctcttctacgatcatcaattcgagaaaaccatacaaatatgaaagaaagggtattttatccttaccaactggatcttggtgcacccggtaacaaacatgcataaaccatttctcgaagtatgtgtccggatagcccaaagtctcgatagttagctctagggcttcccgttaaaaaacaacctcnatgaaggcgtgtaggtgcactattacctggnagggattgca

SEQ ID NO: 462329 - DNA, 650 bp, Sorghum bicolor
taccctttaaccgggttattctatttcacttctagatagagaaacgaactaaaggagaatacttaataatacggcgaaacatttatacaaaacacctatcccgagcacacgcaagggaaccgtagacaggcaagtgaaatccaatccacgaaataaattgatccatggacggcaccgttgtggtaaaggtcgtaatgccagaggaatcattaccgcaaggcatagagggggaggtcataagcgcctataccgtaaaatcgattttcgacggaatcaaaaagacatatctggtagaatcgtaaccatagaatacgaccctaatcgaaatgcatacatttgtctcatacactatggggatggtgagaagagatatattttacatcccagaggggctataattggagatactattgtttctggtacaaaagttcctatatcaatgggaaatgccctacctttgagtgcggtttgaactattgatttacgtaattggaagtaaccaattaggtttacgacgaaacctagaaatcgatcactgatccaatttgactacctctacgggatagacctcaacagaaaactgttgagtaacggcagcaagtgattgagttcagtagttcctcatagaaaatattgactctagagatatg

SEQ ID NO: 462330 - DNA, 608 bp, Sorghum bicolor
gtacagtttttcatcattatcttaaagtggatcgatttatataatgtaaatttagataatgtatatgatagtaatatacttcaaacaaaataggaattcgcaaaatggataaaatcgttgcagtcattataggaaagtatagggagacttagagcatatcctatttgaaggaggatgaaattcaaatcaggtaagggatccttccttctattgatttgatcaaaattcttttttcttttcctctctctctgattttcgatgaatgagcctatggtaatgtttttatctctattctatggcgcaatcgaccgtcgagtctataaacaagtactaaataaggaaaagaaaactatactaaaggaaacataagatatccatcctaaaatggaaaaaaagacgtatatattagggctatacggattcgaaccgtagaccttctcggtaaaacagatcaaacggattattatcgaaatgattcgaactgtttcaaagacccaacatgcatttttctgcattgggctctttcatcaactgatgtaaagatcagttaattcgccatagtttttctttagggaaagataataagatggcttcctgtgctctgattg

SEQ ID NO: 462331 - DNA, 639 bp, Sorghum bicolor
gtcacagttttcacaagacttgaaagattcgttgaaattgttcgtttggaaatttcccgaaaagctaattataggttcttctctccatcggaacaatagggccgttatgcttattactaaacttgttgaagagatgaaatagaaccaaggtctatctttttgatcagaggttaaatcgatcatcagaagaagaattaggccaaaaattaggatacattctgggaaaatgaaacttccattgaagagaagcaaatgaaacgctttcataaaaattctcgtagaatcgagaatgaagttttcattctgtacatgccagatcatgaattagtaactgcagccaatctccgaaaagtcccgattgtttcgatttttggaatgggatatttacggaatccccatgaataggatcaaaccttattccatgctatttccataagattcctctttcttattcttaagcaagcccccgagagggcttagttgatcatgatttctgttttctctttttttttttcctttttatttgtttcgaaaaagatatcgtccgattctccttctattgattcttttccgatcgagatgtatggatccatgtgtctacatacctagattctgttcatggattaacgaaaaatgtgc

SEQ ID NO: 462332 - DNA, 621 bp, Sorghum bicolor
  unsure (1)..(621): unsure at all n locations
ggtacagttttcatcagaganagtcctgaaccactagacgatgggggcatcactagacgatagcaccgtatacaaccactcgtcattatactataatgatagtatgagcagttttttggaattgtcaatatactcttcgaactagatcaaagaaaagagtctttactacttttctgttatgctattttttttagttgatggttaggttaattcacggatcatcccctaccttttaagctttttaaggttaaggaaattcgtttaaagggtatagaataagaatagactaataaaaaggaatctaaattagttcagtacaggtattgatttgattgctataacaggaaaaagagtccaatttcatttttttttgcaattttaactctgtgcttcgtttagtgttcagaccaaaaatgtgggcatctcgcattaaactaagtcataaaattgcaaaaaaaaaaaatggagacattttcaaaaaagaaatgaatgaatttagtagaaaagtactttatcggattcgaaccgataacttctgtcttaccaaggcattattctaccactaagtgaaaagccctttatcggatttgaaccgatgacttatgccttaccatggcatta

SEQ ID NO: 462333 - DNA, 602 bp, Sorghum bicolor
atacactttatgcttacccattcgcttagctgtgtggatatgtctgcgcttaacgttttcatactcgaacataattacgagtaggcccaaataattcgattggggtagttgctgatccataccacatagttccggcaactacgaaagcagcaaaaaaaacagcagcgatactactggaaaggcaggggcaatattgcccatacgtaaccctttgtatagacgttgaggcggacggacacttagatggaataggcccgctaatatgcccaaagtacccgcagcaatatgatgcgaagctattcctcccggaacgaaaggatcaaaaccttctgcaccccacgcaggatttacagcttgtacttttccagttagtccgtaaggatcggacacccatatcccagggccatataaacccgttacatgaaatgcaccaaagccaaaacaagccacccctgcaagaaataaatgaattccaaagatcttgggcaaatccaaagaaggttttcccgtccgctcatcacaagaatatttttaggtcccaatttacccaatgccagatagctgccaagaaacacaagccagaaaacacaatatgcgcacct

SEQ ID NO: 462334 - DNA, 662 bp, Sorghum bicolor
  unsure (1)..(662): unsure at all n locations
gtacagtttttcatcaaaaactccaaagaccacctaattgacaccaacgagtaaaatccccctgtgcttccggtccccatagtagcaacaaagagtgtgctaaactattggcaggtgtggaaaccgccgcggttaagaaattgcaaccttccaaataggaactagccaatccatgggtataccaagaagttacaaaagtagtccctgtaaaccaaccccctaaagcgaaataagcacaaggaaagagcaataagccggaccatcctacaaaaacaaaacggtcccttcgtaaccagtcgtccataatatcaaatagatcgttttcttctttagtaactctaccaacggctatagtcatagtgatcctcctattcaattacttcaaccattttcgagcacctcatattacttccagggcatacgatagtttgattatctgtggacgatttctttctcgttcaatgccctttttcagtcgtctcgaagatagaaattttgcatttttatctatggggtcacaaccaaggtcgtgctaaatccacgaatttcatttaattcattnttcttatactatagaaaagaaataaaagaaaagaaataaagaaataaacatttgaattcagcattattccatgatttctatttcaaagcctattttttaa

SEQ ID NO: 462335 - DNA, 683 bp, Sorghum bicolor
catcatctctcctctcttttctgtttgtatttctatatacccaaacttatataagactagatgaatattaagaggactcttccaactagataaaaatctatcatggtcagcaaagttgtttctttatttgtgtttgctctgttagttaataatttcaatttcattaagaaaaacaaactaaataaatggaaaataaaaattgatagaatggcgtttattttttcttcaaatccaaaaaatttctctttttttttatacataggtcgtcgatttggcattggaaaaaggactgcgtgcccttctagtaaatagttcaaactattttatcgatatgagtgttctatatcagataaattctacactagctatttcccgtttaaagcatttcgagactaatactaatactaatgtagttgtagaaagagtacccctttttgcccggacttcaagcagtttagctttaaccgtgttaatggtctcacattattggtctatagagaatcaaagtaaatttaccaatgaatctcgaaatgctatggttcttccatatgatttctgaagttattcagaagtaattcgtcgagatcgtgcaccttttcttatttatcaaaaaaaaatactaaaaatattctaaagggcagccggatagatccaatctattcttgaaatagacaactcgcaca

SEQ ID NO: 462336 - DNA, 682 bp, Sorghum bicolor
gtacagttgttcatcagataaagtacttttctactaaattcattcatttcttttttgaaaatgtctccattttttttttttgcaattttatgacttagtttaatgcgagatgcccacatttttggtctgaacactaaacgaagcacagagttaaaattgcaaaaaaaaatgaaattggactctttttcctgttatagcaatcaaatcaatacctgtactgaactaatttagattcctttttattagtctattcttattctataccctttaaacgaatttccttaaccttaaaaagcttaaaaggtaggggatgatccgtgaattaacctaaccatcaactaaaaaaaatagcataacagaaaagtagtaaagactcttttctttgatctagttcgaagagtatattgacaattccaaaaaactgctcatactatcattatagtataatgacgagtggttgtatacggtgctatcgtctagtgatgcccccatcgtctagtggttcaggacatctctctttcaaggaggcagcggggattcgacttcccctgggggtagggagtattataaaaagaggttaatcatagattatcaaaaagcctagaataaattcttcctgggtcgatgcccgagcggttaatggggacggactgtaaattcgttgacgatatgtctacgctgg

SEQ ID NO: 462337 - DNA, 671 bp, Sorghum bicolor
catcaatccgagtggcggcattctcgaaaaagatacaattaattagaaaatggattgagttcgagatttccaattttgtaatgggaccttatcgttatgctatttgcaactttagaacatatactaactcatatctctttctcaaccatttcaattgtgattacgattcatttgataaccttattagttcgtgaacttaggggatggggggattcgtcagaaaaaggaatgatagctacttttttctctataacaggatttttagtctctcgttgggtttcttcgggacattttccattaagtaatttatatgagtcattgatcttcctttcatggactctgtatattcttcatactattcctaagatacagaactcgaaaaacgatttaagcacaataactacgccaagtactattttaacgcaaggctttgccacgtcgggtcttttaactgaaatgcatcaatccacaatactagtacctgctctacaatctcagtggttaatgatgcatgtcagtatgatgttactaagctatgcaactcttttgtgcggatccttattatccgccgctcttctaatcattagatttcgaaattctttcgatttcttttcactaaagaaaaatgtttttcttaaaacatttttctttagtgagattgaatatttata

SEQ ID NO: 462338 - DNA, 463 bp, Sorghum bicolor
  unsure (1)..(463): unsure at all n locations
ttctttattatctccttcgaggggtttttaggatcattcaggcgtatgggggctattttggcttttactgtctacttttctcagggagatggttaaggacctcagaagatagaggagagcgccaggcgcagatttccggaatacttctacggggaatgctcattcaatgagcattctccgtattatgcctagaagatgactcnaacctccactctctttancacnanattttnantctcncntntctaccatttcaccatcaanncatcttnaaantnaatcntattccatnaatatnatatctatcnaatntnatatatnnaatatatnacaaanntnnantcttnnantatttccatcccatcctcatatacatatantcctnantcaaacatcaaatancttccatttccattatccctannacaccttatatttatcaaaatccaaatcaaaatcaaaa

SEQ ID NO: 462339 - DNA, 653 bp, Sorghum bicolor
  unsure (1)..(653): unsure at all n locations
attgncaaggaacaagtattttttttacaagatctgattatgcgttaataaatagtaagatgaagaaaaattcgatatactaggtacaataacgcctaagagcccaaaaacatctcgaataggaattctaggattcgattcttttaccgcattgggatatttcgaattcttgaataaaccaattcgagaacaggtggatgccaacaaaatcatcaaagatggatattctttatttcgattcaacaaggtgccaataacttcttgatgttggctaagtgattgaatcttcgccttggaataaaaggaattggtattgttgcgatctaacctattattgggaatcagtcctacacttgtcctatcataccttcttcgtgtatacgaaatagtagacttgactaactcaattcttaggaaatcgcgaattagatcgtttgttcttacctcaacaagagaagcacgagccccctcttttacttcttgttcccaattcactactaagcaagttcgaacgaattgactattcgtgtgataaattctttgagttaacttgctattttcatgagaaataaaattgacaagtcgaagttggagattatcctcttcttgcaggagatcctgcgggaaaagtgttgctaaatttctcccttcgt

SEQ ID NO: 462340 - DNA, 654 bp, Sorghum bicolor
ggaccacaagggactgtttaaaccgattcgtttctgtctataagctcccagtgcatcataggaactagaaaaatggggttctttatctttcgtatacttataataattgttattattgtagttgatttttttatttggagagtttccgcaactattatatctatttgcacaaatacctcgacggtttccaatcgttaatacataaagtccgataagcatgtcttgggttggcacgcaaataggatctccaatagcgggagacaggagattcatatgagaaaacataagtaaacgggcttccgcctgagcttccaaggataaaggtaggtgaacagccatttgatccccatcaaagtccgcattgaaacccttacacactaatggatgtaaacaaatagtacgtccctctactaaagtgggttggaaggcctgtatgcctaatctatgcagggtaggtgctctgttcaacagtacaggatgtccccgcataacttcttgaagtatttcccatacaatgggttccttttcccaaattttccttttagcaatcctgacattagaagtagcacgtttcgtgattaaatcgcgaattacaaatagctgaaaaagctttattgctatctctagaggtaatccacattgatgtaatgaaag

SEQ ID NO: 462341 - DNA, 572 bp, Sorghum bicolor
ccaaagaccacctaattgacaccaacgagtaaaatccccctgtgcttccggtccccatagtagcaacaaagagtgtgctaaactattggcaggtgtggaaaccgccgcggttaagaaattgcaaccttccaaataggaactagccaatccatgggtataccaagaagttacaaaagtagtccctgtaaaccaaccccctaaagcgaaataagcacaaggaaagagcaataagccggaccatcctacaaaaacaaaacggtcccttcgtaaccagtcgtccataatatcaaatagatcgttttcttctttagtaactctaccaacggctatagtcatagtgatcctcctattcaattacttcaaccattttcgagcacctcatattacttccagggcatacgatagtttgattatctgtggacgatttctttctcgttcaatgccctttttcagtcgtctcgaagatagaaattttgcatttttatctatggggtcacaaccaaggtcgtgctaaattcacgaatttcatttaattcatttttcttatactatagaaaagaaataaaagaaaa

SEQ ID NO: 462342 - DNA, 523 bp, Sorghum bicolor
catcacctgcgcatagatagaattaggtaagataaaattgatgtggaaagcccaaactgagaccggagcaattacgtctgatagaataacaaataggccgcttccgtaattgagctcatccttgatataatataatggtacttctgcgcggtaataactgagtataggaataaatcactcattatagcaatgaataaatgcgaaagaatgttggcgggaggttcatgaggaattctgcatgaatagggataaaggacggaacgaataaataaggatccttttgtgtatagcattccgtatcttcaggactattcttctttcctcgggaggggtatacttaacaaaaagaatagagggttaattcgttcttgatagccatatccttaacaagtgaatgggaacatactctagaccggaatctgaagaaagtactgcttgatcatttccaccaattacaagcccttattatgatgccttcaatgaggaaaaatgtctaatgatttagattctctcattactgatc

SEQ ID NO: 462343 - DNA, 528 bp, Sorghum bicolor
aatgattgatttacctattcaaagcaatttacgcgagggactttctgggacaggggtataatttcctgctacggagcccgaaaaggggttgtagatactgctgtacgaacagcggatgctggctatcttacacgtagacttgttgaagtagttcaacatattattgtgcgtagaagagattgtggtactatccaaggggggtgtgtgagtcctcaaaatgggatgacggaaaaactttttgtccaaacactaattggtcgtgtattagcagacgatatatatattggttcacgatgcattgcttctcgaaatcaagatattggaattggattagtcaatcgattcataactgcctttcgagcacaaccgtttcgagcacaaccaatatatattagaaccccctttacttgccggagcacatcttggatctggcaattatgttatgggcggagtcccaatcatggggatctggtccaaatgggggaaactgtaggtattattgcggggcaaataattggggagccaggg

SEQ ID NO: 462344 - DNA, 600 bp, Sorghum bicolor
gtacattttcatatttctttatactcaagctctttatttggggctattgatacctgggccccgggggggggatgtagaaaaattacaatttgcccttagccccggtgttatatttggttatttactaaaatccccttttgggggagaaggatggattgttagtgtggatgatttagaagatataattggggggcatgtatggttgggttccatttgtgtacttggcggaatttggcatatcttaaccaaaccctttgcatgggctcgccgtgcatttgtatggtctggcgaagcttacttgtcttatagtttaggtgctttatctgtttttggttttatcgcttgttgttttgtctggttcaataatacggcttatccaagtgagttttacgggcccactggaccagaagcttctcaagctcaagcatttacttttctagttagagaccagcgtcttggagctaatgtagggtctgcccaaggaccgacgggtttaggtaaatatctaatgcgttccccaacgggagaggttatttttggaggggaaacttatgctttttgggatcttcgtgctccggggttagaacttttaggggcccc

SEQ ID NO: 462345 - DNA, 285 bp, Sorghum bicolor
  unsure (1)..(285): unsure at all n locations
attatnaatntacaanccaaaactgtgaaaacccagaaatatacatacccagttaaggtgggatatgattgcatcgcggtgtctaaggacgcgatctaatagatcgttgtatcnagtagttttttcatagaggatgatgataaaaatnnctntatttncancaacaccaactattanaaatccnccaatccacatntnntntntnaacaannaaanttntntaccatanncaananctanntatnnatannnnnncatanaatacatatnatnanctacaacaat

SEQ ID NO: 462346 - DNA, 591 bp, Sorghum bicolor
gtagtcctcccattaactaatttaagaatttcatagtaatagaaatccatgtcctaccgagacagaatttcgaacttgctatcctcttgcctaataggcaaagattgacctctgtagaaagactgattcattcggatcgatatgaggacccaactccgttgcattgccagaatccatgttccatatttgaagcgggttgacctctgtgcttctctcatggtacaatcctcttcctgctgagccccctttctcctcggtccacagagaaaaaatgtaggactggtgccgacagttcatcacggaagaaagaactcacagagccgggatcgctaactaatagaatagtactactaactaatactaatatatagataactaatactaatatatagatattaatactaatatatagatatatagaaatagatatctagaaatagaaacgaactaatatatagataatcgaaattgaaaagaactgtcttttctgtatactttccccgttctattgctaccgcgggtcttatgcaatcgatcggatcatatagatatcccttcaacacaacataggtcatcgaaaggatctcggac

SEQ ID NO: 462347 - DNA, 615 bp, Sorghum bicolor
agttattgattgcgaacccatattagggtatttacacagaggaatggaaaaaattgcggaaaacagaagtattatacaatacttgccttatgtaacacgatgggattatttagctactatgtttacagaagcaataacggtaaatgcaccagaattcttagagaatattcaaataccccaaagagccagctatattagagtaattatgttagaattgagccgtatagcttctcatttgttatggcttggaccttttatggcggatctcggggcacagactccttttttctacatttttagagagagagaattgatatatgatctatttgaagctgctacaggtatgcgaatgatgcataattactttcgcatcggaggggtagcagccgatctcccttatggatggatggataaatgtttagatttctgtgattattttttacaaggagttgttgaatatcaacaacttattacacggaatcccatttttttagaacgagttgaaggagtcggttttattagcggagaagaagctgtaaattggggcttatcgggaccaatgttacgagcttctggaatacaatgggatcttccgaaaatcgatccttatgagta

SEQ ID NO: 462348 - DNA, 612 bp, Sorghum bicolor
ggtacagttttcaggcacacactttttccgcccgactctttgatcttaacttaagaatgctggttttaagaacgagtgattgcccttctccgacccttactgcccaaccggagagcggacggctaatgtgttccacttattgaacaggatctatggtcggtccgtgacccctggacgccgaaggcgtccttggggtgatctcgtagttcctacggggtggagacaatggggtcggtccatggattttccttccttttgccacatttcgctcaaagggttgaagggagatagtgcatcaagctattcgcaagggccaacttgatcctcttccccagggatcccagatgagggaagcctaggagagccgccgactccaactatcgtccatgtacgatccatactagatctgaccaactgcccatcctacctcctctacctttttgacagcccatctttttgtctcagtagagtctttcagtggcatgtttcagtcctcttccccattacttagaaaaagtgagccaccggttcaagtacaagatactatcattaccgcctggacaattagacagccaaaccctaatcgcaacgacccaattgcaagagcggagc

SEQ ID NO: 462349 - DNA, 627 bp, Sorghum bicolor
gtacagtagttcatcatatttgctgtaatgtttgtaaacggctcagagtggtctaaagataagaattattggacgattggagatgggtttactttactcctttgtataactattcctttttcactaatgactactatcccagatacgtcgtggtatggaattctttggactacaagatcaaaccaaatagtagaacagggtctcataaataacgttcaacaaattgggattcatttagcaaccgatttttatcttccgtttgaactcatttccctaattcttctagtttctttaataggtgcaattactatggctcgacaataagaaatacttagaatgagtcaaaattcttagaatttcaaatataaaataaataactaaagaatcacaattttgatttagtaaaacccatctactgccaacacaacaaaagagaaaagaaggtatttgttgtgtaattgttctattctaattaattgaatcggttcaattcttgtcctcatattgaaatgaatcgagattgataaggagttagttaatgatgtttgagcatgtactttttttgagtgtctatttattttcgattggtatctatggattgatcacaagccgaaacatggttagagc

SEQ ID NO: 462350 - DNA, 592 bp, Sorghum bicolor
gtacagtatttcatcaagaatttccctatcttttttaccaaaagtatccaacagtctatggcttacttgatcattagccattgagaagtcaaagatatatcttccatcaacagaaaaagaataagtattcatttgatcttgatccttgtgcagtgaaaaagatgctatactggatctgcacatacttactgacaatatccataaatggcttgtttttggtaatcgacgaagattaccatattgatattcgggcgcatggtaaacatcagtactccagtgcatttccccgtctgattcggaataaatatgcttttgtaccttttctttaaaatgcaaagtggacgttccggcacgaatctccgcaattacttgttcagattctacatattgatcattttgcactagaatcaagctttttaacggaatattcacactatgtagaatatcctgactctgaatagttacatgcaagtctatatagcatagaaaagcaggctgcccatgacgggtacgtgtggggtgaaccaaatcctcattgaattggatttttccattcgagggggaatcgtttaggtcggcagtaccccctgtg

SEQ ID NO: 462351 - DNA, 607 bp, Sorghum bicolor
gtacagttttcatcaattattatctacagatcccccttatgtacatatccctatggggaatcgtgcttgtaattgttcattgcattaaatattttgaataaaaaaaagagggaatttgctctgatatagattatagcctggccttcttggcccacctaagtgcaattacgataaaagaaaggatatgtagataggtggataactagattggcaagtattttaaaaataaagtactttatctttattttaggattctacaacgaaatcctttattttctagcaattctactactacgaaacaaaaaagacccttcaaattctttttgaaaaagaaactaagcgtgctattctaaatcgaactgaagtcaaactttctagtgcttataaattattatggctttatccctttcatagaaaggagataaaacgagaaatctttgctatccaatctttttagaatatcataaagtttaagtggcataatttttttctaggactgttttatcaattcatttttattccatttcgacccctgcgaaattcgaactttcgtcgaaatcgtctctattcatatgtatgaaatacatatatgaaatacgtatgtgga

SEQ ID NO: 462352 - DNA, 618 bp, Sorghum bicolor
catcatctctctaattagtttatgtttgttctaattacaaaacaaacaagaactaatctgttatgggtgcaggccaatcgctcttttgactttggaatacagtctctttatcaatatactgtttcttttacacattcaagtcataacatcccttttcaatccataatcaagaataattaggatttctaaaaaaaaagtaaagggtccagggggaggaaaacctaacctttccctgcattaggcactaatctatttttaacgtctaattagatcggggaatccttccaattaaccaattaagaagttaagctcgttgcttttttttttattttaccagaattagagccaggctctatccatttattcactagacccagaaaatcaatttctttttttttataaaaaaaaagaaattgattttattacgacatgctattttttccattcattacctttgaggatcagtcgtggtcttctagactctaccaaaagtctggacgaatttgttgcttcatccaaatgtgtaaaagatcatagccgcacttaaaagccgagtactctaccattgagttagcaacccagataaaataggatctcttagataccatcaaaatctaa

SEQ ID NO: 462353 - DNA, 637 bp, Sorghum bicolor
catcacatacaaggatttagtcgggcctattcatacactatctaaacaaggaagtgaaatgtcggcgatgcccctttcggggggcattccgatttcgctagtaccatcttttttgccgcgcaaatccagattgagattgaggaaagggagtaaataaagttttcgaatcactgactcaggcccattgtcgaatcctactcagcaattgtcgagtgctactcagccaaaaaagggggtacttatgtatggcagaacgggccaacctggtctttcataataaagagatagacggaactgctatgaaacggcttattagcagattaatagatcatttcggaatgggatatacctcccatatactggatcaaataaagactctgggcttccatcaagccactactacatcgatttctttaggaatcgaggatcttttaacaataccctctaaaggatggttagtccaagacgcggaacaacagagttttcttttggagaaacactattattatggagctgtacacgcggtagaaaaattacgccaatccgttgagatatggtatgctacaagtgaatatttgaaacaagaaatgaattcgaattttcgaataacggatccttctaatccaatctatctaat

SEQ ID NO: 462354 - DNA, 555 bp, Sorghum bicolor
atacttattgtctcgggggggatatatttcagttggtagagctccgctcttgcaattgggtcgttgcgattacgggttggctgtctaattgtccaggcggtaatgatagtatcttgtacctgaaccggtggctcactttttctaagtaatggggaagaggactgaaacatgccactgaatgactctactgagacaagggatgggctgtcaaaaaggtagaggaggtaggatgggcagttggtcagatctagtatggatcgtacatggacgatagttggagtcggcggctctcctaggcttccctcatctgggatccctggggaagaggatcaagttggcccttgcgaatagcttgatgcactatctcccttcaaccctttgagcgaaatgtggcaaaaggaaggaaaatccatggaccgaccccattgtctccaccccgtaggaactacgagatcaccccaaggacgccttcgggcgccaggggtcacgggccgaccatagaacctgttcaataagtggaacacattagcccgcccctttccggttgggcagtaa

SEQ ID NO: 462355 - DNA, 637 bp, Sorghum bicolor
tcaaaacagaaaaaaaagattctaaggaatcaaaaaaaaggaaaaattgggtttatgtgcaacggaaaaaaattctcaaaagcaaggaaaagtattttgtttcggttcgacctgcagtctcatatgaaatggacgaagggagaaatttagcaacacttttcccgcaggatctcctgcaagaagaggataatctccaacttcgacttgtcaattttatttctcatgaaaatagcaagttaactcaaagaatttatcacacgaatagtcaattcgttcgaacttgcttagtagtgaattgggaacaagaagtaaaagagggggctcgtgcttctcttgttgaggtaagaacaaacgatctaattcgcgatttcctaagaattgagttagtcaagtctactatttcgtatacacgaagaaggtatgataggacaagtgtaggactgattcccaataataggttagatcgcaacaataccaattccttttattccaaggcgaagattcaatcacttagccaacatcaagaagttattggcaccttgttgaatcgaaataaagaatatccatctttgatgattttgttggcatccaactgttctcgaattggtttattcaagaattcgaaatatcccaatgc

SEQ ID NO: 462356 - DNA, 597 bp, Sorghum bicolor
tcaaagcttagtaataagcataacggccctattgttccgatggagagaagaacctataattagcttttcgggaaatttccaaacgaacaatttcaacgaaatctttcaatttcttattttattatgttcaactttatgtattcctctatccgtagagtacattgaatgtacagaaatggctataacagagtttctgttattcgtattgacagctactctagggggaatgtttttatgtggtgctaacgatttaataactatctttgtagctccagaatgtttcagtttatgttcctacctattgtctggatataccaagagagatctacggtctaatgaggctactatgaaatatttactcatgggtggggcaagctcttctattctggttcatggtttctcttggctatatggttcatctgggggggagatcgagcttcaagaaattgtgaatggtcttatcaatacacaaatgtataactccccaggaatttcaattgcgcttatattcatcactgtaggacttgggttcaagctttccccagccccttttcatcaatggactcctgacgtctaccaaggagtgtggttcgttcg

SEQ ID NO: 462357 - DNA, 428 bp, Sorghum bicolor
aaaacaaacctccattccctaatacatacgacacattttttataaacctttggtggaggtggaaatactattacacccaatctttttactatctattctctaaataactaaactaaaaactaaaaaaaaatttgcatgattcaaacaaaaaatctttctcaactattcctcttctactaacacaagttatactaatatacagtagacggtggtgtgaccatctatcttcctcaagggaaaaccaatcaagctgttcctgaataacttccttcaaaagggtatctgcttgctcggcgaatgtcttactacaagatataatttcttggaattgacgcttaatatctattatgtgtttacctaactcatccagaaattactttacctattcaatctctaacgaatcaaaatatcctctccttccgctataa

SEQ ID NO: 462358 - DNA, 596 bp, Sorghum bicolor
acctcatgttgaggcaatcaagaaagctgcataagttaatatataacccacggaggagtgggctaatccgaccaatcttgcttgcacaatggaaagagccacgggcttatctctccagcgaattaaattagccaaaggtgtgcgttcatgagcccatgctaaagtctcaattaattcctgccaatatccacgccaggaaattgggggcggaaatcctgtagcccaaacaagatgtccaaataagaacatccaagcccatactgataaactattcatcccaaaaggattatatccattaataagttgtgaagagtttaaccataggtaatctcttaaccatcccatcaaataagtggaggattcattaaattgtgaaacgttgccctgccataatgtaatgtgtttccaatgccaataaaaagtaacccatccgatggtatttaacatccagaaaacagccaaataaaacgcgtcccaagcagaaatatcacaagtaccgccgcgccctgggccatcgcaaggaaaactatacccgaaatcctttttatccggcattaatttggaaccgcgtgcatctaaagcaccctttactaaaa

SEQ ID NO: 462359 - DNA, 643 bp, Sorghum bicolor
  unsure (1)..(643): unsure at all n locations
catcaaaacattaaagaatacaatccttatccatcttttctttcttttntgcttcatatggcgaagaggggaattcaaaaagggaaaattttcgtcatgtcacgaagaattctatctcttgcataggaataactagaattaaaaaaaagggaatgacaaagcatctgggaataaacgattgatttctatcaataaacctgctaaagccccaagggggggagtacttagcacgggtgctacagagagatatgtttttatatcccgcattgaaaatcctccttccgtattggaatacatatatgatcagatactcttgcccaagatcctttgtatttcttttgtttaggcgaaattcctaactaaaaaaacaaaataaatattctatatatatagaatgaaccgtatagacgagattttcctatccctaaaaaagatgaccccttcttcctatacattactaaggaatagtagtctttcttttataggtgaaatttgactggattttagtttataccctcccttgattatatgagaccaaaaacaagaaatgacaagaaagttctatatggataaagaaatagaagaaaattactatgtggaaaacaagaaaggaattgtgtacaatggcattgtacaacaattt

SEQ ID NO: 462360 - DNA, 327 bp, Sorghum bicolor
  unsure (1)..(327): unsure at all n locations
aatcccctcccctcaactccatatccaaataaaacccctaangaaaaanttttaataaaaanaataatcaatnnattcatnattaaacccctcctacttcttntattttcccacaattttttttttttgggggggggggganaaatatntattctactttataaaaaaatactttnnangatcataaatatnactatttctttccaattanctntttttccattaattncnacttcctcanttttantaattantntaccccttntatttncttctcccnatnnntnntcaaataataaaaacctnnnattttcccctacatcatta

SEQ ID NO: 462361 - DNA, 670 bp, Sorghum bicolor
catcataaccaatcaatttgaaagtagagtagacagaatatatgaatttatctctagtcctgaattgcattgatttaaaaatggatatttgcaaatcagataatacctaaaatataaaaatagagtccctatccgtagaatggaaacctttttctttttttcgcgccgatcttggtcaaaagttttaaggcctgtgctgaaactaggggggcctactctttaatctggccatgaaacatagaattagaatactccccctctttttttttttacttactttagttctttagtttttggaaaataaataggggggtacttcttttctttcatattggatgtcaaatagatcctgtaagaattcccacttcatagatacggggtataaagtttatcaaaaaagttccaatttcaaaacacatattcaaaacacatatgagtaatgagtagtaggggcatatcctgaatgtgcctgatagacacaaatttttcatgaaaataaagatattaaatttgactggacttgacactttatttttggttttctgagaaagaaaaaaatgcttagaaatgcatctaatctacgagttcataagagataattattctctttaataaacttttgtgtcgtgcagggcacaatacgattctatctttcgcttcatcagaaaaa

SEQ ID NO: 462362 - DNA, 637 bp, Sorghum bicolor
  unsure (1)..(637): unsure at all n locations
taatcctaaatagaatgnaaggacgtagggttttctatgtaaacagagtgtcctatttccataggctcgaatgaccccttctcataataagaatgtgcacgatctggtccggtatggaatgaacttataatctgatgatcgagtcgattccatgattataagttcataaccctagcacccnattcccatttttgggcgggggggagggctactaattcttttattccagttagtaagagggatcttgaactaagaaatagacctagcagctaaaagagggtatcctgagcaattgcaagaatggggttcattgatattcctggtatagtagatgctatcacacatacagncatactcaattcgatggaatggtttgatcttaaaggggatcttctataattncgcacataaggggttatttcttggtttcgtccagtcattaataacttgattatttttagataatagtagatagaaagaacgctcgnaaggagtcctattgaaaccaagaaatataggcctggttgccatccacaccagaatagatagaggtttccgaagaaacctgctggtggaggaagggctcctagggataagagacataggggcttagagagagccaaaaaaggtctttcgg

SEQ ID NO: 462363 - DNA, 590 bp, Sorghum bicolor
  unsure (1)..(590): unsure at all n locations
tagagcaatagcatgatgaaccaagaaatccccaggtgctattgttaagaaaagcgaattactattctcattaacagcattcaaccatcccggtaaccatatgtttcgacctgcattgaaagcggggccattcgttgatgataagagggtggggaacccatatgtcgtcttaccatgagcagattgtatccattgggcaaatataggttcgatcaagatttgcttttctggagtaccaaaagcaagcataacgtcgttatgaacataaaggcccaaggtatggaatcctaggaagaggctagcccaacttaaatgagatatgatagcttccttatggtctaacattcttgccaatacattatcttcattctgttccggattgtaatccctaatgaaaaaaatagctccatgagcaaaagcccctgtcatgatgaaccctgcaatggattggngatgagtatataaagcagcttgagtagtaaagtcttgggctatgaatgcataagcaggtaaagagtacatatgttgagctactaaggaaggaataacccctaaggaagcttgagcaaggcctaattgaaaaagaatcg

SEQ ID NO: 462364 - DNA, 576 bp, Sorghum bicolor
tgtttagtttctataatggattcttattggaatactaatgggggggcgggggtgtaagtgctacaagatctagtgcactggaactcgtggttatggacccgaatcctttagtatggaacattgtcttttccaagtaaaaacccctagtatatgaaagaatgaaaaggtgctttcgttcttgtggaataagaggggggggtaccttaatgaaaggaaaataggaatttttcgttaggtatttgaccaaataggatcgtccagttcctatagaacctatcactaaaatacccgatagggctaagcggaacgaaaagggttttccatgagatggtaaatgaaaacgattagccccacacgaggtttgggaataagtgattgtctgataatgagcaaggaatatacttctttctgctaaagaggatctattaaactcataattcattagatccttgttagcaatgtcaactaggtatcataagtaaatggatctcggttgttcaatcctttgataactaaggtcattctttgctaaagagaaatgatcactatgggtcagactcaatagaattggatcca

SEQ ID NO: 462365 - DNA, 527 bp, Sorghum bicolor
  unsure (1)..(527): unsure at all n locations
taaggacccgctaagtttctactnnnncttttggagaagcggggatcctacaannactatagagatgaacccaatccagaatacgaaccgtaaaagaaaacacctattaaaccaatcacaagaataccagttacagtacctatcagccaaagaggaattcttccagtagtatctttcttttcccggggggtgctccacattttctcaagtggtcatcctaaaaacaaaaacagtcatggatagttataaagatggtatccttccaaatgggataagagaattcttactactctctttctttctctcaattgaagaaataattggaaaataaaacagcaagtacaaaaatgagtaataaaccccagnatagactggtacgattcaattcaacattttgttcattccggtttgattgggtcatagttctataattggaatttggtttatcgntggatgaactgcattggtgatattgatcccaagaaaaaaaccgngggtacagctaatcccngaacagccagccatcg

SEQ ID NO: 462366 - DNA, 599 bp, Sorghum bicolor
atcattaacttttaaaaataaaaaagggttcaaatctctgtttcttttctttatggtgtagaaggaggtgagattaggtgcccttttcttcattgtgcatttcttattaattttgtatgccgctattccgaagaatattttttttattcttgcttatcctactttcctagttgttctaagtaatatgcgcggtacaaagttcgtggtgggggcttctttgagtcattgtatttttctgttcatacgaaggaaacaaatatgtgattttccaaattggaaaatcgaaatgaagccctttttgttcagtctatctggacctttttgtataataggaattaattagaatattatattctaagtatttcgtttcgtctaggaacagaacctcaaaatattcctttactttaataaaatctggaattgtgttgtataagtgaacatgaatttattatcactcaatgagcatcttgtatttcatagaaattgggggttatatagtccttacgtaagggccagcctatccaactttcaggcattaagatacgtttaagacgtggatgattatcataagaaattcccaccatatcataagattcgcg

SEQ ID NO: 462367 - DNA, 223 bp, Sorghum bicolor
  unsure (1)..(223): unsure at all n locations
cttaacnttaatggcgagttcaaaagaggaaagcttgcggtggatacctagccccataacagaaggcgtagcaagcgacaaatcttcggattgaaatattttttccggggtggtgaatanntcaacctttttaactgcctactaaatccatnancangcaaaaaacaacctntctaacttaaacatcttantanccanannaaaanaaancaaaancnattcc

SEQ ID NO: 462368 - DNA, 632 bp, Sorghum bicolor
ataagccaatgatttttttccgtctttcattatacggttaaccaccatgttaactaatcgattacgaaaaattggatcggattttgcggttcttttttctgcagtacctcgacgtgacatgagcgtgaaagaggttcaagaatccgttttctttttataagggctaaaaacgaatcacttatttttttggctttttgggcgatattgtagggtggatctcgaaagataggaaagatctccctccaagccgtacatacgactttcatcgaatacggctttccacagaattctatagggatctatgagatcgagtatggaattctgtttactcactttaaattgagtatccgtttccctccttttcccgctaggaccggaaatcctgtattttccatatccatacgatcgagtccttaggtttccgaaatagtgtaatggaaaaagaagtgcttcgaatcattgctatttgactcggacctgttctgaaaaagtcgaggtatttcgaattgtttgttgacacggacaaagtaagggaaaacctttgaaagaatttccatattgaccttggacatataagagttccgaatcgaatctctttagaaagaagatcttttgtctcatggtagcctgct

SEQ ID NO: 462369 - DNA, 642 bp, Sorghum bicolor
catcagttccataatgttcgttgccaacgatccgaggctgtaacatagttgaggttgaatctaaaggatctactgcgggataaatacccttggaagctaatcctctggaaagtacggtagtagcgtccaaatgtgcaaatgttgtggcaggagcagggtcggtcaaatcgtctgcaggtacataaactgcttggatcgaagttatagatccctttttggtagaagtaattctttcttgcaaagaacccatttctgtactaagggtaggttgataacccactgcggagggcattctgcctaataaggcggatacttccgatcctgcttgaacaaaacgaaagatattatcgatgaataaaagcacgtcttgcttattaacatctcggaaatattctgccatagttagggcagttaaaccaactctcatacgagctcccggcggttcattcatttggccatagactagagctacctttgattcctcaatatttttttcattaattactccggattccttcatttccatataaagatcatttccttcacgagtcccgtcccctactccggccaatacggatacgcctccatgagctttagcaatggtattgattaattccatgatgagtactgttttacctactc

SEQ ID NO: 462370 - DNA, 700 bp, Sorghum bicolor
tggtacagttgttcatcattcttggattatttacaagcggtattcaagctcttatttttgcaacgttagccgcagcctatataggtgaatccatggaaggtcatcattgaattaactagtttttgaaatagtctttttttttagcttagcccaattcatgcatgattccggataatcctcttggttggaaaactaaatagttcgaaaggcgtatgaatatacaacctagagttgtaggagagagaatagactatattatggaagaggtaaaatatatatgcattcaggggggcggaatctggttagatctatatccttaatgcctataagacagtcatcttttgtgtggctttctaaggaatgattttagaatcggattcaatagaaaatgagaaaatacgcaaacaaaatagaagaaacaaatgtatatgggattttttttattcctaagttagattcattatctaatccgatatatagaattcccttctatatggaactggattccatatcaagttctatgcagcatattgttatcaattgtatatcttgatttgattcctattggatttggattagttcgatttcaataggggttcttcagagtaaaaaaaaggatggaataaaagagtgatttgtttgaaagaaagagaaatagaataatgagaatcatatggatttacacaaacctctaatgatt

SEQ ID NO: 462371 - DNA, 675 bp, Sorghum bicolor
agaccaattctgattatttcaaaatcttattatttgtttgcttgttgcccagaaaaaccttttggttttggatgctcgttgccgctagaaaatgatcttgattttgctaaagaataagattgtactatggaaaaataagtcttttttttccaaagatttttacgaatactcttttttgacatcgaagtacgtttttttggaactgccattcaaaaagggaattacttttttctagttgtatgtgaaagacatctattgccgcaaatcaatccttctttctgttttttcttagtatttatacttagatactgaaagatacttaaatgatactgaaagatacttaaattctaaattcttctttagttcattttgtctaatgtggataagacaagagttttttaagattttctatttaaatcaatttatatatcaaatatactccatatataaatatatggtatgggggataagccctcatataagaggggggcataaaaagaaggaaggtaaaattcaattcaaatagttaattaagttcagaaagctattgcataattgaattccaagtctcttaaacaagacattctaaaacttagagaattctagtcattaggatttccttttatatgaaataagcaatattcgagaatttcctataaatataggttttctttg

SEQ ID NO: 462372 - DNA, 559 bp, Sorghum bicolor
  unsure (1)..(559): unsure at all n locations
ttttcatcatctacaactaacaactcatttattttgagaccgacttacttcctatctagaaggggggtgggtagtcctttatattgcaatgtgtcaaccgtcaaatgctttggtaatttgcccggatcggatgaagcaatataattttgaaccaaacgttttgatcgttggttatccttcgtagtaataatatctcggggtttgcaacgaaggggggggatatcaactatacgaccattaactaaaatatgtctatggttaactaattgtcgggccccaggaatggttgaagccatacccaatcgaaaaaggatattatccaaacgcatttcaagtaattgtagtaaaacctgacctgtggatcttttcgcttttccagcgatatgtacatatctaagtaattngtcgtctgtcagaccataatgaaaacgcaatttctgtttttcttgaagacgaatacgatattgctcttttttcccagaatggaatttctttttctgattacttccggatttaggcgtttttctagtgagtcctggtaaagctcccaaacggcgta

SEQ ID NO: 462373 - DNA, 592 bp, Sorghum bicolor
aggtacagttttcatcacaccagataaaagtcagaatatggttcttatgggtggtttaagaaaatacgttccaattacaagaactacttttttatgtggtacactttctctttgcggtattccacctcttgcttgcttctggtccaaagatgaaatacttagtaatagttggttgtattcacccttttttggaataatagcctcttttactgcaggattaactgcattttatatgtttcggatatatttacttacttttgatgggtatttgcgtgttaattttcaaaattacagtagtactaaagaaggttcgttgtattcaatatccttatggggaaaaagtatatccaaaggagtcaatagggattttgttttatcaacaatgaagagtggagtttcttttttttcacaaaatatacccaaaattcctgctaatacaagaaataagataggatcctttagtactccctttggggctaaaaaaacttttgtctatcctcatgaaacgggaaatactatgctatttcctcttcttatattactactttttactttgttcattggatccataggaatcccttttgataatgga

SEQ ID NO: 462374 - DNA, 575 bp, Sorghum bicolor
  unsure (1)..(575): unsure at all n locations
gtacagttgttcatcacccactggaccagaagcttctcaagctcaagcatttacttttctagttagagaccagcgtcttggagctaatgtagggtctgcccaaggactctgactgggtttaggtaaatatctaatgcgttccccaactgggagaggttatttttggaggggaaactatgcgtttttgggatcttcgtgctccgtggttagaacctctaaggggccccaacggtttggacttgagtaggttgaaaaaagatatccaaccttggcaagaacgacgttcagcagaatatatgacccatgctcctttaggctctttaaattccgtgggtggcgtagctaccgagatcaatgcagttaattatgtctctcctagaagttggttagcgacctcccattttgttctaggattcttcttttttgtgggccatttgtggcatgcaggaagagcccgagctgctgcagcaggctttgaaaagggaattgatcgtgatttggaacctgttctttacatgacctcttttaactaagattttttatttataccctgtnctagttntnttctttgtctg

SEQ ID NO: 462375 - DNA, 636 bp, Sorghum bicolor
gtacagtttttcatcaagtaccggtgtatatagaaattcccttatggtctaattccgagcggtagtaaataccaggacttagcaatatttgattgatcacaattcggtatattccatttattataaaggttcctaaggaattcattataggaatgtttccaatagaaatggtttgcttttgcacatcgaaaccaaaaattaatctcgcggatacatataattgggaagaataggtgagtgattcatacacagcattcctttcttttatcgagggttctagcaattgatatcctttcgcaaataattgaaatgcaatttcgtgatctggatctttaattgtgggaaacttctcaagttcttccgccaatccttgattaatgaatctacaaaatccctcgaattggatctgactaaatccgggtattgtggacattccctcatttccattccggagcatttgaatcttaagtttcctatttatagaagaaaaattccattatcagctcactcttcatcaatccctacggatcaatctagcaatcatggaatccattattctgttactgaatcacatgaaattctagggaactccacatacgtatttcatatatgttattcatacatatgaatagagac

SEQ ID NO: 462376 - DNA, 499 bp, Sorghum bicolor
  unsure (1)..(499): unsure at all n locations
aatggaacatggngtaatattcattttgtcctctgataaagggggaacgggagaaaaaagaattcttttgattcaagcatgtctttctcaactcagcaacttgaagtattaatcttatatttaatataccaagaaatcacatcagatcataatatatatcaataccctctaatatatatcaatattccccttggtggtgtatgcaaaacaaaaaataatantaattaatcctataaatctacccanttgctcaanaattaactattcttcttaatcaaccatttcttatatanagagaaccgccctcanaaattgcaaatactaatttgttaagaattaatcgaattgaagtcatagtgtcatccttggcaggaatcgatatattcgcaagatctgggtcacaatttgtatcgactaaagaaatagtaggaatccccaaaatggcacattcccgaagagctatatactctttttcctgatcaaagacgatcacaatgtc

SEQ ID NO: 462377 - DNA, 569 bp, Sorghum bicolor
ccaagcacacgtattaactagaaagaaaatagattatagaaggcttgttatttaacagggtgacatagtctatataccaatgtcaaccaagccagccccaacaattggattttcgtataacttcatttaccaaatccaaaaattttggaaatgaagttagtaaaaattcaaaactcagattgctcttttctattttccatatgggggggccgggactcgaacccggaactagtcggatggagtagataattcttccttgttacaatagaaaaaacccctccccaaatcgtgcttgcatttttcattgcacacgactttccctatgtagaaatagccgatttctattccgaagaggaagtccactaatttttagaatttttaattagttaaagtgattcacctactatggaacatttcagaatggaaaatgtgcaagttttatcttgatatcgatcttttctagtttattaattttgtctaatgattaattaagagtaagaggattcaccaggtcattgatacggataatatccaaataccaaatacgctcactttgtgatccatggaaa

SEQ ID NO: 462378 - DNA, 650 bp, Sorghum bicolor
ataaggaaaggcatacatatcatacgtgaatttagtataatttaggatactactctatttttatgattataccaccctcatcttaacttcctattcgactcttatgaaatcgagtaccggtattttaccggaatccatacataaaccgtattcgtttattgttagagaatgaatttcatctaattagttacttttttggggttaaaccgcacccctgccattttctagttccaactttgtttgtgtatgttcaatgaataattggaaagaatccacctcattctcactccatttgccgactccttcttttatggatttgctctcatctttagaccccaaaaagcgtatattgatagtaacctaataaaataaaaaccaagcaaacgctctttttcctaaattaaaatatgggatcctttttatttaagatcctcttttctccatctcatttctacttctactgcttattgggatgtctatgtgacccatagaaagttggtcatataatacatacataattgtatgtataactataagaaaaaggaagggaaattggataagataagaaagattttggattatacatatagaaaaacaaaagtagaaaagaaatgaaaatagaatagaggggggttcgaatccatcaaaaa

SEQ ID NO: 462379 - DNA, 662 bp, Sorghum bicolor
gtacagtttttcatcataactggagctattttacaaatattatctcatggatttattggtgctacactttttttcttggcgggaacggcttgtgatagaatgcgtcttgtttatctcgaagaactggggggaatatctatcccaatgccaaaaatttttaccatgtttagtagcttttcaatggcttctcttgccttgccgggaatgagcggttttgttgcagaattagtagtattttttggactaattactagtcctaaatttatgttaatgccaaaaatgctaattacttttgtaatggcaataggaatgatattaactcctatttatttattatctatgttacgccagatgttctatggatacaagctatttcatgttccaaacaaaaattttgtagattctggaccacgggaactctttcttttaatctgtatctttttaccagtaataggaattggtatttatccagattttgttctctctctatccgttgatagggtagaggctctattatccaattattatactaaatagaattttctttttttaaccagtccgctctatattccagagtggaaaaattaaaattaagaaaaagtaaaaaagtctaattagatctatctcgaatttttgagaaccctttgaacgtcttttcaaag

SEQ ID NO: 462380 - DNA, 646 bp, Sorghum bicolor
atctagagctgtttgtcgttccaatccagttccaacaatgcacttctcggaccgagaaagtggaactgcttggcgctgcatattagaactcattaaagcccgattcgcatcattatgctcaataaaaggaatgagagaacctccaatagaaaaatattggaaaggaaaaatacttctaacatgaatctgttcccatgcaatagtcaggaattcttgacggtatctagctggaacaacctgttcttcctgaataccctgattcaaggacaaagaatttcctgctgctatcatataatattcatctctatttggtgataaataaactacctgtctctcttttttttcttttgctttctcagatatttcataaaacggactctctatagatccccaccagtgatcaattctcgcatgaatagctaacgatccggtaagtccaacattgattccttcggacgtgtcaattggacaaatacgcccatagtgactcggatgaatatctcggctacgaaaacttgcagttctccccgtcaatcctccaggacccaaacaactcacttttcgcccatgaaccgtttgtgtcaatggattggtttgatcaaaaacttgagctaaggggtatgtgccaaaaaagggctcataagta

SEQ ID NO: 462381 - DNA, 622 bp, Sorghum bicolor
  unsure (1)..(622): unsure at all n locations
acaaacagaaaagagaggatagaggataggctcattacataaaaaaaagatatggaaatagccataatacataacaaaaaagaaaaaaaaggagcgggagagccaaatgaatcgaaagattcatgtttggttcgggaagagatcataaaaattgtaaacttaatagcaagataatctactttcattaaaagatttattagataatcgaaaacagaggatcttaagtactattcgaaattcggaagaattgcgtagagggacccttgaacaactcgaaaaagctcgtattcgattacagaaagtcgaactagaagcagatgagtatcgaatgaatggatactctgaaatagaacgagaaaaagaaaatttgattaatgctacttctattagtttggaacaattagaaaagtctaaaaacgaaacccttttttatgaaaaacaaagggcgatgaatcaggtccgacaacgggttttccaacaagctgtacaaggagctctaggaactctgaatagttgtttgaataccgagttacatttccgtacgattcgtgctaatattggcattctcggggccatagaatggaagagataattaaatntattagggttttgacttctactt

SEQ ID NO: 462382 - DNA, 673 bp, Sorghum bicolor
ggtacagtagttcatcaacctttgatggttataagggtatccaaagtacaaacctgatggttgtttgttatcccaaccattcttcccaaccctgataccaatcaggaaagggctaatttctaacaaagtttttctcttgttgattcctatttcgtggtgtagtgcttttctcccctatgctgcctattggtactagtagagtcggattggcctgtaatacagaacctatcctgtaggtgtaacctttcgctcaatactcaaatctacaattgaagcatctgaggccacatcaatcgaggatacacgacagaaggaattgttagttcacctcaccttccccaagcgcgggtttcctttactaattttgttctctctatgcgaaccctctctctttctcgtaagaatgagatataggtagggctaaaataaaaaaaagagtcaaatcgcaccatctctataataagtaaatgcccttttttccccggaggttgtcggaattatttgcaataaaatattggctacaatcgaggaggtcttatcaatgaaatttccatttatacgggatctaggcataattcccaacccattctatatagaaatcttttcattctatcacaaaataccataaaaacaaaacactcgattcttataaatcgatccatatgctctaaat

SEQ ID NO: 462383 - DNA, 609 bp, Sorghum bicolor
  unsure (1)..(609): unsure at all n locations
ggtacagntttttcatcagnatcgaaaaaaaaccgatctacttctttttggtattttagactaaattcttttgttcctcgatgctcaataaaaccctctttttttaagatagaatcttcctccgggctcccatattcgtcttctgagtcttcctctgagtcttcctctgagtcttcttctaaagtcccatattccttctctgagccatcttcagagctcccatattcttcttctgagtcttcctctaggatttcatattcgccctctccctctcgggtcctatatttgttctctaggctcccatattcttcctctgagtctttctctagagtcctatattcgtcctctaggatcccatactcatcttctagggtttcatattcgtcctctagagtcctatattcgtcttctaggatttcatattcgccctctccctctcgggtcctatatttgttctctgggctctcatattcgtcttctgagtcttcctctcgagtcctatactcttcctctcgggtccgatattcttcctctagggtcctatatctaaatttaacaattcctgaaccccttttatcttttctgtatcgtggatcgtcaaaataagca

SEQ ID NO: 462384 - DNA, 617 bp, Sorghum bicolor
  unsure (1)..(617): unsure at all n locations
cttgggggtcgtggaatgcttttcttctctctcttattccatatggaatacaatgagttaaaataagaaggaataggggaatattcgaccgtttgctccaaaaagaggatgaaatccatcctattaaaaaagaaataatccgaaatagaaagaatttttttttcaaattaaattctttatttatcttttattccaaaattcccccgaaaatccaatttcatttttcaatggcgttagatgatctagttcttaatattattagtttacttaattgacagattccacaacaaatctcttgattcggaattagggactcatgttccgtctgatgaatcgattttctctttttttttacacttctgtatctcactctatcttgttttttagtattatctaaaataaccaatgaattatgaattttccataacttaaaacttaaacttaggtaagtgctttaccaacattatgtagtgtagtaaaaaaaaatggaatttaaccccttcatgcttactataactagttatttcggttttctactggctgctttaactataaccncagctctatttattggcttgaacaagatacgtcttatttgaaatgaattgaatgaatag

SEQ ID NO: 462385 - DNA, 395 bp, Sorghum bicolor
  unsure (1)..(395): unsure at all n locations
caaccccaaactaataataactaaaaattccttttaccactctctaactgggggggggctattacatctaaatatccctcctcctaacgataatacaaaggcccacataatggccaatattgaaactgctcatccaaaccacatagctcctgcaactactaacgcagcaaaaaaaacaccaacctttctactttgaaaggggggtgggggataaatncccatactttaacccctacacaaaaaccattnaggctcagcggacacttacaagcgaaatagacccgctaaaaatgcccaaagtactccgccccaaaatcttagcgaagctataagctccgcggaacgctaaagaactcactctaaccatgctgagtcaggccgcatggtcaatagct

SEQ ID NO: 462386 - DNA, 638 bp, Sorghum bicolor
  unsure (1)..(638): unsure at all n locations
ggtacagttgntcatcattatttttgacctaaaccctactgctgccccgctttctatctttctatgaaagagtaaggaggtcttatccacaatccaaaaattgatttttgatcagcctattcaatctaattctcgacagaatcagtagcctttactttagtgtatgtaggtagcataagatatactaagtgtatgtagtaagatgtacgataaataaaatggggataattaggaagtctttctatttcttcgcaaagtcccttcttcaatcttagattgaaaaaagactgccccttagggacctttggctacgaagatttctgacatcttagtctcgtagttttaaattcccgaatcgaatcgatttaaattaataaaagaataaggaaacgctacctcatccctattggtaaccgtttgggccactgcccacaaaacaaaccctagtttgagggtagaactatggtatggattctcaaaatccagtatcgccaaacctagttactctcgtgccccaacttaggggggtacgaatttgtcgagtntgatcagtactataatcctaagtattttattgatcaggcggcacccagatttgaactgggggtaaaggatntgcagtcccctgccttaccact

SEQ ID NO: 462387 - DNA, 593 bp, Sorghum bicolor
tcagtacaaattccctcttttttttattctaaatatttaatgcaatgaaaaattaaagcacgattccccatagggatatgtacataagggggatctgtagataataatgctgttcggacctggagtttccctatatacagattagggaaacatttattcttattctattttattatgccattcaaaataatgggggggggggggaataccgatttaagagtcgttcactactgcaattcaaaaaaaaattatattaattatattatagttaatggttctaatttgttctgaattttgcagcctgcgactggaaatccactttttcttctttgtcatctcaatagaatagaaagaaacgggaagttttctagtgttagcaatgtgtgttttaagatagaatccatcgaggagaataagcgaaactggatccaaaaaagcagaaatcgattttttgaaaaagattcgaaaaaagaaagtaagtagaattagattcaagataaaagaaaaaaaggttttagtaattttaataattagtaaaaaaatgtggatgaattcttgctcttttctcgattttagatcggattttttggcgg

SEQ ID NO: 462388 - DNA, 658 bp, Sorghum bicolor
taaagtggatcgatttatataatgtaaatttagataatgtatatgatagtaatatacttcaaacaaaataggaattcgcaaaatggataaaatcgttgcagtcattataggaaagtatagggagacttagagcatatcctatttgaaggaggatgaaattcaaatcaggtaagggatccttccttctattgatttgatcaaaattcttttttcttttcctctctctctgattttcgatgaatgagcctatggtaatgtttttatctctattctatggcgcaatcgaccgtcgagtctataaacaagtactaaataaggaaaagaaaactatactaaaggaaacataagatatccatcctaaaatggaaaaaaagacgtatatattagggctatacggattcgaaccgtagaccttctcggtaaaacagatcaaacggattattatcgaaatgattcgaactgtttcaaagacccaacatgcatttttctgcattgggctctttcatcaactgatgtaaagatcagttaattcgccatagtttttctttagggaaagataataagatggctccctgtgctctgattgattatttgtcttatgatctatctaggaacaataccaaagtgtttcaaaggaggattaccttgacttaagtct

SEQ ID NO: 462389 - DNA, 643 bp, Sorghum bicolor
tacaaaattgacaatctcacgaggatgaaatatcagtaactttctatggggctggtggatcccatcttttacggaatcaattccttttttgaataaaaattttgggagctcagcatgtctggaagcacgggagaacgttcttttgctgatattattaccagtattcgatactgggttattcatagcattactatacctgggtattcattgcgggttggttatttgtcagtacgggtttagcttatgacgtgtttggaagtcctcgaccaaacgagtatttcacggaaagccgacaaggaattccattaataaccgaccgttttgattctttagaacaactagatgaatttagtagatccttttaggaggcccccaatgaccatagatcgaacctatcctatttttacagtgcgatggctggctgttcacggattagctgtacccacggtttttttcttgggatcaatatcagcaatgcagttcatccaacgataaaccaaattccaactatagaactatgacacaatcaaacccgaatgaacaaaatgttgaattgaatcgtaccagtctatactggggttaattactcatttttgtacttgctgttttattttccataccttcttaattgagagaaagaaga

SEQ ID NO: 462390 - DNA, 576 bp, Sorghum bicolor
gagaaggatcgaccctttcccaacaaataatctatcaacctcaaaaaaagcggggtgaatttaatgaattaatagatttttctgtaacaaaaacaattaactattaaacaaataagctattaaacaaataagctatgccaatgaaaagattggtcgtttttgggtagttataaaattctcatacttcttcgactcgaataacaaaagaaagaaattttttttgtaaagtaaaattaaggtctttgcttttacttatagcattctttcttttacctaaaagaaagaactcaaaataaaaaataagaaaagtacgatttcgaatccattctatccaacgaacagttcttaccttaaccttaccgaaatggatcattctagatatttaaagaatcacagatcgagatcgttttcgcttaaccaaagaaaagaaggacgcttcttttttactaataatacaagaaaacaaataatacaacaaaaatctatctctatcataaagggataggtgtcattttctatacagtgttttacctcattaaattttttttttaatcaatttgaaagtagagtagacag

SEQ ID NO: 462391 - DNA, 666 bp, Sorghum bicolor
ctggggttaaaccgcacccctgccattttctagttccaactttgtttgtgtatgttcaatgaataattggaaagaatccacctcattctcactccatttgccgactccttcttttatggatttgctctcatctttagaccccaaaaagcgtatattgatagtaacctaataaaataaaaaccaagcaaacgctctttttcctaaattaaaatatgggatcctttttatttaagatcctcttttctccatctcatttctacttctactgcttattgggatgtctatgtgacccatagaaagttggtcatataatacatacataattgtatgtataactataagaaaaaggaagggaaattggataagataagaaagattttggattatacatatagaaaaacaaaagtagaaaagaatgaaaaatagaatagagggggtttcgaatccaatcaaaaaacccattttggtcttagtatggataagagatcttcctatgttatattattccactatcaaccatgaattgatttgatagatccaatattcataatattgaattgattcagtattatcagaatgcaagtcctccccttgaatttacaggatacccctttttcctctccatgggattacatcccgagttattgtgaaaaaaaaaaataaaga

SEQ ID NO: 462392 - DNA, 681 bp, Sorghum bicolor
gtacagaatttcatcatgctattgagaggaaaaggattaaaccctttataagaactaaagttttcatcggagatatgaatataaaaaaacttaaggatgccttaagtatatcatttcaaattcagttattaatagaacgaatcacacttttaccactaaactatacccgctacatgtagattatgataccaatgctaccctttgtcaagggtagccattcgagaaggaggctaattccaccttatcgaatcaaaggagaaagttcatggcggtgggcgattggtacttcaatcgcgggtctttactttaggatttagatagcccctctctagtctgtaaaatacatctcttcttaccataccaatagcgtatgaaccaaatgtatgcatttcgattaggatctattctacggttatgactacaaggatcattatttgtaaggacgtaaatgtgccagactgttgtctggaatcgtttaattattcctacaatatatactaagagatataaaggcagtacaatcccctccctttcttccttttcttttttgttcagaattgaacaaagaaattgggaaagatggtttcttcctccacgtatcatgaagtgcgagccatagggaaggagtgagatgactttcacaaatttatcatagacttcgtctatcgcttgagagaagca

SEQ ID NO: 462393 - DNA, 623 bp, Sorghum bicolor
  unsure (1)..(623): unsure at all n locations
tggatctttaattgtgggaaacttctcaagttcttccgccaatccttgattaatgaatctacaaaatccctcgaattggatctgactaaatccgggtattgtggacattccctcatttccattccggagcatttgaatcttaagtttcctatttatagaagaaaaattccattatcagctcactcttcatcaatccctacggatcaatctagcaatcatggaatccatattctgtttactgaatcacatgaaattctagggaactccacatacgtatttcatatatgtatttcatacatatgaatagagacgatttcgacgaaagttcgaatttcgcaggggtcgaaatggaataaaaatgaattgataaaacagtcctagaaaaaaattatgccacttaaactttatgatattctaaaaagattggatagcaaagatttctcgttttatctcctttctatgaaagggataaagccataataatttataagcactagaaagtttgacttcagttcgatttagaatagcacgcttagtttctttntcaaaaagaatttgaagggtcttttttgtttcgtagtagtagaattgctagaaaataaggatttcgttgtagatcctaa

SEQ ID NO: 462394 - DNA, 589 bp, Sorghum bicolor
ggattcgcttgggtaacgaaatcaagtgcttgtccccttttcttttttattgaattaactaattcatttccttttgacttttggatttttggatattttttttgatttgatttggcattattcaacaagaaaaaaaaatttcgataaattccttttttttgaaaattatgtgataattatgagaaccaatcctactacttcgcgtcccggggtttccacaattgaagaaaaaagcgtagggcgtattgatcaaattattggacccgtgctggatatcacttttcccccgggcaagttgccttatatttataatgctttgatagtcaagagtcgagacactgccgataagcaaattaatgtgacttgtgaggtacaacaattattaggaaataatcgagttagagctgtggctatgagtgctacagacgggttgatgagaggaatggaagtgattgacacgggaactcctctcagtgttccagtcggtggagctactctcggacgaatttttaacgttcttggggagcctattgacaatttgggtcctgtggatactagtgcaacattccctattcatagatctgcgcct

SEQ ID NO: 462395 - DNA, 659 bp, Sorghum bicolor
atgatagaactaaaatagatatcttttgttttctactcacgcgagccggggtcggtgcttttttatcaattgctaattccgaccttcctccccaatctgatattatagtaccggtgtatatagaaattcccttatggtctaattccgagcggtagtaaataccaggacttagcaatatttgattgatcacaattcgggggggtgcatttattataaaggttcctaaggaattcattataggaatgtttccaatagaaatggtttgcttttgcacatcgaaaccaaaaattaatctcgcggatacatataattcggaagaataggtgagtgattcatacacagcattcctttcttttatcgagggttctagcaattgatatcctttcgcaaataattgaaatgcaatttcgtgatctggatctttaattgtgggaaacttctcaagttcttccgccaatccttgattaatgaatctacaaaatccctcgaattggatctgactaaatccgggtattgtggacattccctcatttccattccggagcatttgaatcttaagtttcctatttatagaagaaaaattccattatcagctcactcttcatcaatccctacggatcaatctagcaatcatggaatccatattctgtttactgaat

SEQ ID NO: 462396 - DNA, 583 bp, Sorghum bicolor
  unsure (1)..(583): unsure at all n locations
attcatttcttttttgaaaatgtctccattttttttttttgcttttggggactgangttaatgcgagatgcccacatttttggtctgaacactaaacgaagcacagagttaaaattgcaaaaaaaaatgaaattggactctttttcctgttatagcaatcaaatcaatacctgtactgaactaatttagattcctttggggggggctattcttattctataccctttaaacgaatttccttaaccttaaaaagcttaaaaggtaggggatgatccgtgaattaacctaaccatcaactaaaaaaaatagcataacagaaaagtagtaaagactcttttctttgatctagttcgaagagtatattgacaattccaaaaaactgctcatactatcattatagtataatgacgagtggttgtatacggtgctatcgtctagtgatgcccccatcgtctagtggttcaggacatctctctttcaaggaggcagcggggattcgacttcccctgggggtagggagtattataaaaagaggttaatcatagattatcaaaaagccttagataaattcttcctgggtcga

SEQ ID NO: 462397 - DNA, 659 bp, Sorghum bicolor
ttgggcaaatccaaagaaggttttccttgtccgctcatcacagaatatttctaggtcccaatatacccaatgccagatagctgccaagaaacacaagccagaaaacacaatatgcgcacctgccacaccttcataactccaaatacccggattcgttacagttcctcctgaaatactccaaccaccccacgaattcgttattcctaaacgagtcatgaaggggatgacgaacataccttgtctccacattggatccagaacaggatcagagggatcaaaaaccgctaattcgtataaagccatcgagccagcccaaccagaaactagagctgtgtgcattatatgcaccgaaagcaatcgacccggatcattcaatacgacagtatgaacacgataccaaggcaaacccatggaaatacccctttagcaaagaaaaatagacacgatgtcgctttattttatcgcattggaaaagactgtccatacatattctatgtacctaacccttctaggggattctatgtcagaaagcgtgaatatttatttcattccattaaaaataacaagccaattctgtttgtaagaagaaagagaagcagatctattctatactcgataagtgccaatatgcaatgggtagcttgggctatttggaaaaa

SEQ ID NO: 462398 - DNA, 342 bp, Sorghum bicolor
catcatttcttttgctaaatgatatcaattaaatggtatatcaattctataaattggatatagcaataaataaatcagcaaaattcttttattttagatagaagaaatgtttcttctatctaaaataaaagaatgtacccttctatccaaatccaatttgcatcgataaaataaatccaaattccagattccagcagtagatgaataattgcaaatttttgtgtgtacgagattagaataacttaaaaataactgacataattttttatttttcctgatcagaaaaatacatgaaaaagaaaggaggtagaaaaatttgttgatttatggttaaagaagaaa

SEQ ID NO: 462399 - DNA, 655 bp, Sorghum bicolor
gtacagaatttcatcatcactaataggctcgcgattcgactttgatcgttatggattggtaccaagatcaagtcctagacaagcggacctaattttaacagctggtacggtaacaatgaaaatggctccatctttagtgcgattatatgagcaaatgcctgaaccgaaatacgtcattgctatgggagcctgtactattacagggggcatgttcagtacagattcctatagtactgttcgaggagttgataagttaattcctgtggacgtctacctgccgggttgcccgcctaaaccagaggctgttatagatgccctaacaaaacttcgtaagaagatagcgcgagaaataattgaggatcgaactctatgtcaaagtcaaaagaaaaatagatcttttactacccgtcacaaactttatgttcggcgcagtactcacactggaacttacgaacaagaattgctctatcaatcaccatctactttagatatatcttctgaaacttttttcaaatccaaaagttcagtatcttcctacaaattagtgaattaggaggggttcttttgtgcagaaaaagaaagagcagtgcaatctttaaaacttgcatttgaaatgtgaaatatttatacaaagggggagagatcaagaacatgc

SEQ ID NO: 462400 - DNA, 602 bp, Sorghum bicolor
  unsure (1)..(602): unsure at all n locations
ggtacagttttcatcaagtcggataggctggcccttacgtaaggactatattacccccaatttctatgaaatacaagatgctcattgagtgataataaattcatgttcacttatacaacacaattccagattttattaaagtaaaggaatattttgaggttctgttcctagacgaaacgaaatacttagaatataatattctaattaattcctattatacaaaaaggtccagatagactgaacaaaaagggcttcatttcgattttccaatttggaaaatcacatatttgtttccttcgtatgaacagaaaaatacaatgactcaaagaagttcctaccacgaactttgtaccgcgcatattacttagaacaactaggaaagtaggataagcaagaataaaaaaaatattcttcggaatagcggcatacaaaattaataagaaatgcaaaatgaagaaaagggcacctaatctcacctctntctataccataaagaaaagaaccagagatttgaacccttttttatttttaaaagaaaaagaagtgtttagagatttatctacttactctagacatttatctacttactctagactaagtag

SEQ ID NO: 462401 - DNA, 609 bp, Sorghum bicolor
gtacagtttttcatcaaattcttgaataaaccaattcgagaacagttggatgccaacaaaatcatcaaaggtggatgattctttatttcgattcaacaaggtgccaataacttcttgatgttggctaagtgattgaatcttcgccttggaataaaaggaattggtattgttgcgatctaacctattattgggaatcagtcctacacttgtcctatcataccttgttcgtgtatacgaaatagtagacttgactaactcaattcttaggaaatcgcgaattagatcgtttgttcttacctcaacaagagaagcacgagccccctcttttacttcttgttcccaattcactactaagcaagttcgaacgaattgactattcgtgtgataaattctttgagttaacttgctattttcatgagaaataaaattgacaagtcgaagttggagattatcctcttcttgcaggagatcctgcgggaaaagtgttgctaaatttctcccttcgtccatttcatatgagactgcaggtcgaaccgaaacaaaatacttttccttgcttttgagaatttttttccgttgaacataaacccaatttttccttttttttga

SEQ ID NO: 462402 - DNA, 653 bp, Sorghum bicolor
ttacttacaaactacccagcgcaaattttttcgggacgaatagagcggacgtgggtcgagccaagagcattttcattactatggaaaatgatggatagcaaaatccacaatcgatcatgtccttcaagtcgcacgttgctttctaccacatcgttttaaacgaagttttaccataacattcctctaatttcattgcggagtggtatcgagaattgatccaatatggatggaatcatgaatagtcattgcttttgtatactaattcaaacctgctatctatggagaaaattggataaaagaaataagtatttatcggggaacactctgcaaagatacaatttatttaaacccatattctttctatcatatgaatgaaacatagttcgaaaaagaggaataaaagagtttacttaagacttctttatttttattattgaatttccattctcaacagagaactcaagatgatcaatcctgaaatgagaaggatcgaccctttcccaacaaataaactatcaacctcaaaaaaagcggaattaatttaatgaattaatagatttttctgtaacaaaaacaattaactattaaacaaataagctattaaacaaataagctatgccaatgaaaagattggtcgtttttgggtagtataa

SEQ ID NO: 462403 - DNA, 481 bp, Sorghum bicolor
  unsure (1)..(481): unsure at all n locations
gaccactctgagccgnctacaaacattacttagacagggagggaagacataatggctcccacataaataagaagttgtgcgacagctacaaagtaggaatttaataaaaaatagaataaggatatacaaacaagaactaatcccagcgaaaaggcagaataaattgggttggttatttatactactggtggacctcctagtagaagaacaaatcccccaaatagcacaagaatctcatgtattggtccaggtaaatccattatggataagaagaaatttctagtataaaatttttcatgaactgactaaaactaaaagattcaaggaaggaaaaaggtattaggatatttttttgtatatgcatataagttgttaagcagtagttatttttttttccttagagttagcaaaaatggatttttttaataaaaaaatcctaatacctattaattcgtaatttgaattggaattccaagatttt

SEQ ID NO: 462404 - DNA, 608 bp, Sorghum bicolor
  unsure (1)..(608): unsure at all n locations
ctactcttttttagggaaagagcgatgtattttatttctacttaatgctctccaattctaccagaaatcatataagaatttgttaggagtaaattcctttaacgggttcatccatagtcttagggcagaatagaatggccttttgactctgtacccttgattccactatgattattgatcaatagtagtaagaattctgtggtagaaataggagacataatttacatggatatagtaagtctcgcttgggctgctttaatggtagtctttacattttctctttcgctagtagtatgggggaggagtggactctagggatactaccaattgattgagtagtcgaattgtagtatcaactcttttctttaattgatcgttttgcattaataattntgccaaactttattttttctttctttagttntgtttcactcttgtaagaaactcttttaagaaagtaagaaagagtcgttctattctactatgttctattccagtataatagaaagggcgattataggaactcataatttctattctactagaaattattgagtaaaagaaagttctatacataagaaaatagaacataagaaaattagactttc

SEQ ID NO: 462405 - DNA, 668 bp, Sorghum bicolor
ataggtcttggtgaaataatgtcaggtgttattagtcgaatttgcagaagggacgagaggtattgctctgaatttggaatccaaaaatgttgggattgtattaatgggcgatgggttgatgatacaagagggaagttttgtaaaagcaacaggaagaattgctcagatacccgtgagcgaggcttacttgggtcgtgttataaatgctctcgctaaacctattgatgggagaggcgaaattgtcgcttcagaatctcgcttaattgaatctcctgctccgggtataatttctaggcgttccgtatatgaaccccttcaaacagggcttattgctatcgattcgatgatccccatagggcgcggtcagcgagagttaattattggggacagacagactggcaaaacagcagtagccacagatacaattctcaatcaaaaagggcaagatgtaatatgtgtttatgtagctatcggtcaaagagcatcctccgtggctcaagtagtaacaactttccacgaagagggggccatggaatacactattgtagtagctgaaatggcggattcacccgctacattacaatatctcgctccttatacgggagcagccctggctgaatattttatgtaccgcgaacggcatactttaataatttatgatgatctct

SEQ ID NO: 462406 - DNA, 262 bp, Sorghum bicolor
  unsure (1)..(262): unsure at all n locations
tctccttnnnttggttggcgtcctcccnttttgttcttggtttcttcttttttgtgggccctttgtggcttgccggnngngcccgngctgctgcngcnggctttgnnnnggttttttttttttntgggggtgttgttctttncntgncccctcttncctnngnttttttntttctgcctgttctggtttttttctgttctggctcggnttttccctcttgccgngcccttctgcttttttttgtnngnttgtttcgggggct

SEQ ID NO: 462407 - DNA, 112 bp, Sorghum bicolor
  unsure (1)..(112): unsure at all n locations
tagaaagaactatantgtagttcgtttctaccacacgtttatgattccaactctgacctcttatctattgatgaactacatgtactcatcttggattaggctgcctatggtc

SEQ ID NO: 462408 - DNA, 574 bp, Sorghum bicolor
  unsure (1)..(574): unsure at all n locations
cctatatncgtcctctaggattttttactcatcttctacggggggatattcgtcctctagagtcctatattcgtcttctaggatttcatattcgccctctccctctcgggtcctatatttgttctctgggctctcatattcgtcttctgagtcttcctctcgagtcctatactctttctcttgggtccgatgttcttcctctagggtcctatatctaaatttaacaattcctgaaccccttttatcttttctgtatcgtggatcgtcaaaataagcaaaaatagtatttctacgtaaaacacccataaagggtatttccattgaaatacccaaacaggatattcgctctttttcttgttcttgatgatattgtaatggaacggcaaacctatttcttcgctttttcgccaacaaatccgaattatcttgaagaatagaaggatagaaacaattccaatgaccggtggacacgattcgatctggcgttaaataatcaagaatttncctatcttttttaccaaaagtatccaacagtctatggcttacttgatcattagccattgagaagtcaaag

SEQ ID NO: 462409 - DNA, 671 bp, Sorghum bicolor
  unsure (1)..(671): unsure at all n locations
accgatatggatcattctagatatttaatgtatcacagatcgagatggggggggggtaaccaaagaaaagaaggacgcttctttggtactaataatacaagaaaacaaataatacaacaaaaatctatctctatcataaagggataggtgtcattttctatacagtgttttacctcattaaatttttttttcaatggttgtaaagtagagtanacagaatatatgaatttatctctaatcctcacattccattgatttagaaatggatatttgcaaatcagataatacctaaaatataaaaatagagtccctatccgtagaatggaaacctttttctttttttcgcgccgatcttggtcaaaagttttaaggcctgtgctgaaactaaaaacatcctactctttaatctggccatgaaacatagaattagaatactccccctctttttttttttacttactttagttctttagtttttggaaaataaataggggggtacttcttttctttcatattggatgtcaaatagatcctggaagaattcccacttcatagatacggggtataaagtttatcaaaaaagttccaatttcaaaacacatattcaaaacacatatgagtaatgagtagtaggggcatatcctgaatgtgcctgatagacacaaattttt

SEQ ID NO: 462410 - DNA, 580 bp, Sorghum bicolor
gcatttcaagtaattgtagtaaaacctgacttgtggatcttttcgcttttccagcgatatgtacatatctaagtaattgtcgttctgtcagaccataatgaaaacgcaatttctgtttttcttgaagacgaatacgatattgctcttttttcccagaatggaatttctttttctgattacttccggatttaggcgtttttctagtgagtcctggtaaagctcccagacggcgtattttttttaaacgaggccctcgataacgggacatgaagactccttttttattttattgaaatttcattttacacaataaatttcgttctatttacattacagaatacagcgaaattcaaacagaattaaactaaaggataaacagagtaaaatctactaaagtaacacaaaaaatggagtaacacaaaaaatggaatttcatcaacatctggattttttgtatatatattatttatttttatgctttgtatctagcaaaattgtaaggtaaaacgacataatagaccctggattccccatttaattcggagaaaaaaagaaattcttgttcatggaacatcgatag

SEQ ID NO: 462411 - DNA, 488 bp, Sorghum bicolor
  unsure (1)..(488): unsure at all n locations
cgccctccttttttttccngngntgggcgggcggggcttttttttggttttttnctcttttctgtgcgtcttngngttgnccccntgngnttngntggcnngtgcctgntnncgtttgtcnggtcgtgtnggnccccggttcnnntcgttcgttcgttnggttgccttttttgcntcgtggggtgcnncttcccttgnctcctttttnnncggctcgtctcgccgctgccttntcctntttcncttcttctgtcgctcnctccccgtttgggtggngnncccgncgctgtctcggctgtgcttccggnggctctngggnngtcgggggggngggcccttctcttggggtgggcttccttcttttttgctttcngcngttttcctctccccccttggcttccccgcgtttcccgtnggccccgtncctggtccccccggggggcgtccttcccggtcctctcgtccttgggnngggtcctctcnttgct

SEQ ID NO: 462412 - DNA, 671 bp, Sorghum bicolor
  unsure (1)..(671): unsure at all n locations
ggtacagttttcatcacaaagactcaatggaagctgttctaacgaatcgaagtaataacgattaatcacagaacccatattataatataggttctttattttattttgagaatgaaattaggaatgattatgaaatagaaaattcataatttttttagaattattgtgaatctattccaatcgaatattgagtaatcaaatccttcaattcattgttttcgagatcttttaaaaagtggattaatcggacgaggataaagagagagtcccattctacatgtcaatactgacaacaatgaaatttctagtaaaaggaaaatccgtcgactttataagtcgtgagggttcaagtccctctatccccaaaccctcttttattcgctaaccatagttgttatcctttttttttatcaatgggtttaagattcactagctttctcattctactctttcacaaaggagtgcgacaagaactcaatgaatcttatgctattcattaaatagatgatttcttttttatctcttttttttttatttattagagtacagtatcggcaaggaatctcgattattaattcgatttttttaagtattattaagtaagccatccacatgcataggactacccctccccaatttctaatnttgaatgggatactttattggttttt

SEQ ID NO: 462413 - DNA, 590 bp, Sorghum bicolor
ataacaataagaaatagtataaatggaaaatgtgcgatatgttgtgaatagcggggtgtgggaaagtctaattttcttatgttctaattttcttatgtatagaactttctttttactcataatttctagtagaatagaaattatgagttactataatcgccctttctattatactggaatagaacatagtagaatagaacgactgtgtgttactttcttaaaagagtttcttacaagagtgaaacaaaactaaagaaagaaaaaataaagtttggcaaaattattaatgcaaaacgatcaattaaagaaaagagttgatactacaattcgactactcaatcaattggtagtatccctagagtccactcctcccccatactactagcgaaagagaaaatgtaaagactaccattaaagcagcccaagcgagacttactatatccatgtaaattatgtctcctatttctatgaaagaattcttctactattgatcaataatcatagtggaatcaagggtacagagtcaaaaggccattctattctgccctaagactatggatgaacccgttaaaggaatttactcctaacaa

SEQ ID NO: 462414 - DNA, 454 bp, Sorghum bicolor
  unsure (1)..(454): unsure at all n locations
aggacgaaccncaaccngngcncgagagatttttttccatacagggataagggatgtatggattctcgagaagagaaaagccgcggtggcccccccccccgaccgcccttatcccacgagtgaatagaaagttcgatctacatgggatctcacctgaatcgccccatctatcctcctgaggagaagtttgtttggtttcaaactccgattcaaacaggaggagtacgccatgctaatgtgccttggatgatccacatcttcgggtcaggccctgatgagcacattgaactatccatgtggctgagagccctcacagcccaggcacaacgacccaattatcaggggcgcgctctaccactgagctaataacccgncccgccggcctcccaaagggaggcctgctaccccaaaagccaaaaaaactccatccctttccttttgacatccccatccg

SEQ ID NO: 462415 - DNA, 659 bp, Sorghum bicolor
catcacgttccaaaaacgggtactatcggatcgggtgaattagagaatagacagaggtgcggtggcatttcagcttctcttctcctttcagggcctatccgaaagagaatccaggacctcttggtcctgaatatcagaataggacgaacgaaccggcctccgcggatatctttgcttcggaacaaaacaattagcattaggctcggtcaactggaatgtgtattatccatatgggagatcttccaatcgagaagatccatcgatctgagacgaagagaaagggcccattttctttacttattcagttaaaccaaggattcgttatggaaacagatagcaacaaccatttcatcagacatgcgtatttttgattatccggtggatttacacagtttcattaatgcaaattgtttgatgtagttagtactcaggttattcgacgctcaagaattcttatttaggcagttcatatcatcccatacatagtgttttgatctaagattgcaattcttccatgtttccgcagtagcatattgttccatggagctagggtccaaaataggaatcaacaagtgtttccacgactctaccgcccggccaatcctgttccactgaatcccctccctttttcatggccacatatctttacgggtaaagga

SEQ ID NO: 462416 - DNA, 559 bp, Sorghum bicolor
  unsure (1)..(559): unsure at all n locations
aacctatattctctnctaggatnncatattcgccctctccctctcggggggcgtgtttgttctctancctctcatattcgtcttctgagtcttcctctcgagtcctatactcttcctctcgggtccgatattcttcctctagggtcctatatctaaatttaacaattcctgaaccccttttatcttttctgtatcgtgggggcggcaaaataagcaaaaatagtatttctacctaaaacacccataaagggtatttccattgaaatacccaaacaggatattcgctctttttcttgttcttgatgatattgtaatggaacggcaaacctatttcttcgctttttcgccaacaaatccgaattattttgaagaatagaaggatagaaacaattccaatgaccgttggacaccattcgatctggcgttaaataatcaagaatttccctatcttttttaccaaaagtatccaacagtctatggcttacttgatcattagccattgagaagtcaaagatatatcttccatccacagaaaaaggattaagtttcatttgatctt

SEQ ID NO: 462417 - DNA, 692 bp, Sorghum bicolor
gtacagtttttcatcaaatgaacgtctttttttgtagcgggatcgggggaaagaatgggaaagacaatttcactatatttcttaccgggaacagggcctatcacaagaatattttttttattgggacgataactctgaaaagagagatttcctatcttttctttcaactcaggagaaatacggtcgggcggcgctaattcgaatccctcaggcaaaataagaacagcacccacattcaaccctccctttttaccattagcaagaacttgtttcagctgcatatcataaggaattcgaagaactgcttcaaatacagtatcaggaagcactgcttggggaacttcaatatctacaggcttattagctaaatggcaattggcacatacaattcgtccagttgcttcccgcgggttttcataaccctgctgcgcaaaaatgggatatgcgtttgaaatagatgtgcgagttattacgtatatcatgatcgatacagaaatcgatcgaatcatctgttcctttaaccaagaaaaagtttttctattttccatgtccaatcgcggatcccggaatttctacaataaattagataggtagctaagctaatctagttccctatacacgagtctgttgtcattctactgcaatagttgtactagaatgatgaataccttgagcaggtagaaatagaaaga

SEQ ID NO: 462418 - DNA, 635 bp, Sorghum bicolor
gtacagttgttcatcaaaccttcccccaagaggtttttcttaacaccaatgaattatattaatgctagaggaaaacgatagctccaagaatttctttgttctcaacgcctcctatttagaggaattagccacttcaacgacctttgatggttataagggtatccaaagtacaaacctgatggttgtttgttatcccaaccattcttcccaaccctgataccaatcaggaaagggctaatttctaacaaagtttttctcttgttgattcctatttcgtggtgtagtgcttttctcccctatgctgcctattggtactagtagagtcggattggcctgtaatacagaacctatcctgtaggtgtaacctttcgctcaatactcaaatctacaattgaagcatctgaggccacatcaatcgaggatacacgacagaaggaattgttagttcacctcaccttccccaagcgcgggtttcctttactaattttgttctctctatgcgaaccctctctctttctcgtaagaatgagatataggtagggctaaaataaaaaaaagagtcaaatcgcaccatctctataataagtaaatgcccttttttccccggaggttgtcggaattatttgcaataaaat

SEQ ID NO: 462419 - DNA, 588 bp, Sorghum bicolor
  unsure (1)..(588): unsure at all n locations
atcaataacaagggttcaggaattgttaaatttagatattggaccctagagtaagaggggcgtgcgcgagaggaagagtatangactcgagaggaagactcagaagacgaatatgagagcccagagaacaaatataggacccgagagggagagggcgaatatgaaatcctagaagacgaatataggactctagaggactaatatgaaacgcggggaagatgagtatgggatcctagaggacgaatataggactctagagaaagactcagaggaagaatatgggagcctagagaacaaatataggacccgagagggagagggcgaatatgaaatcctagaggaagactcagaagaagaatatgggagctctgaagatggctcagagaaggaatatgggactttagaagaagactcagaggaagactcagaggaagactcagaagacgaatatgggagcccggaggaagattctatcttaaaaaaagagggttttattgagcatcgaggaacaaaagaatttagtctaaaataccaaaaagaagtagatcggttttttttcattcttcaagaactgcatatcttgccgag

SEQ ID NO: 462420 - DNA, 636 bp, Sorghum bicolor
gtacagtttgttcatcaatattcaggaccaatacgttgttgtatcgatgcggatatttctctttctaaccacacaattacgagtacttctattgtgattcccagtaggagggccaaaatgggtagaatccatataagtccgtagatttcttttaataattccgatttcgaaaaagaattgatagtttctacctctaccctatctattatcatttcaacgatcaacttcccccataatgatatctatactacctaatattgtcatgatatcagccaatttcatttttttaactagctgaggaagaatttgcaaattaataaaacccggtggacgaattttccatctccaggggaaaagactatcatctcctaccagataaattcctaattcgccttttggagcttctactcttacataaagctcttgctttgataattcaaaattgggcgacggttttttaccaagaaatcgatattcaaaatcattccattcgggattctttgctttcttaaagcgtcgggcttctaaattctcataaggtcctccaggaattttctctacagcctgttgaattatttttatggattccctcatttcaccgactcgtactaaatagcgagctaacgaatcttcttc

SEQ ID NO: 462421 - DNA, 673 bp, Sorghum bicolor
gtacagttgttcatcaatatctccgttaaaaagcttgattctagtgcaaaatgatcaatatgtagaatctgaacaagtaattgcggagattcgtgccggaacgtccactttgcattttaaagaaaaggtacaaaagcatatttattccgaatcagacggggaaatgcactggagtactgatgtttaccatgcgcccgaatatcaatatggtaatcttcgtcgattaccaaaaacaagccatttatggatattgtcagtaagtatgtgcagatccagtatagcatctttttcactgcacaaggatcaagatcaaatgaatacttattctttttctgttgatggaagatatatctttgacttctcaatggctaatgatcaagtaagccatagactgttggatacttttggtaaaaaagatagggaaattcttgattatttaacgccagatcgaatcgtgtccaacggtcattggaattgtttctatccttctattcttcaagataattcggatttgttggcgaaaaagcgaagaaataggtttgccgttccattacaatatcatcaagaacaagaaaaagagcgaatatcctgtttgggtatttcaatggaaataccctttatgggtgttttacgtagaaatactatttttggttattttgacgatccacgatac

SEQ ID NO: 462422 - DNA, 651 bp, Sorghum bicolor
  unsure (1)..(651): unsure at all n locations
tcatcattcaaaaagaattaattccgtaatggtaagacgaaaaaagaaaaaataaaaagggagtgtggaaaaaatgacaagaagatattggaacatcaatttgaaagagatgatagaagcgggagttcattttggtcatggtattaagaaatggaatcccaaaatggccccttacatctcggcaaagcgtaaaggtactcatattacaaatcttgctagaacagctcgttttttatcagaagcttgtgatttagtttttgatgcagcaagtcagggaaaaagcttcttaattgttggtaccaaaaaaagagcagcggatttagtagcatcagctgcaataaggtctcgttgtcattatgttaataaaaagtggttcagcggtatgttaacgaattggtcgattaccaaaactagactttctcaatttagagacttaagagcagaagaaaaaatgggaaaattccaccatctcccaaaaagagatgcggcaatcttaaagagaaaattatctaccttgcaaagatatctcggcgggatcaaatatatgacgaggttgcctgacattgtgatcgtccttgatcagcaaanagagtatatagctcttcgggaatgtgccattttggggattcctactatntctttagtcgatac

SEQ ID NO: 462423 - DNA, 670 bp, Sorghum bicolor
tttcacattttttggaatatagcctcttttactgcaggattaactgcattttatatgttggggatgtatttacttacttttgatgggtatttgcgtgttaattttcaaaattacagtagtactaaagaaggttcgttgtattcaatatccttatggggaaaaagtatatccaaaggagtcaatagggattttgttttatcaacaatgaagaggggggtttcttttttttcacaaaatatacccaaaattcctgctaatacaagaaataagataggatcctttagtactccctttggggctaaaaaaacttttgtctatcctcatgaaacgggaaatactatgctatttcctcttcttatattactactttttactttgttcattggatccataggaatcccttttgataatggagtaaaagataatagaatattggagttaaccatattatcaaagtggctaactccttcaataaacttgttccaagaaaattctaattctttcataaattcatatgaatttctcactaatgcaatttcttctggaagtttagcaaatttttggtctattcatagcatatatcttttatggatccgcttatctttttttaagatttgaatttcaaaattcccttgtaaaaaaaaaccaaaaaaagctttttggatggagt

SEQ ID NO: 462424 - DNA, 669 bp, Sorghum bicolor
tcatcatttttcattcgagtatctattagaaaagaattctccagcatttgattccttactaacaaagtatttattggtacacttgaaaggtaccccagaaaatcgaagcaagagtttgttaattggtttagacgaatcctttgtggttgagtccaaaaagagaaaaaatattgcgagaaattgacaaggtaagatttccatttcttcttcagaggaagagtgccttttgatgcaagaattgcctttccttgatatcgaacataatgcataagaggatccataaagaaccatatggttttccgaaaaaaccccgggtacattacaccaaaatgttccatcttcccagaaaagatgattcgttccagaaaggttccagaagatgttaatcgtaagcaagaagattgtttacgaagaaacaacaagaaaaattcatattctgatacataagagttatataggaatcgaaatagtcttttattttcttttttcaaaagaaaaatggatttcattgaagtaataagactattccaattcgaataatagtggagaaagaatcgcaataaatgcaaagagggaacatcttgaatccggtattcaaggagttgaaccaggatttctaaatggataggataggggatttttatatgtgatagataatgtaaatgcaaa

SEQ ID NO: 462425 - DNA, 633 bp, Sorghum bicolor
ctaatcagaatggtacagtagttcatcacaggagtccattgatgaaaaggggctggggaaagcttgaacccaagtcctacagtgatgaatataagcgcaattgaaattcctggggagttatacatttgtgtattgataagaccattcacaatttcttgaagctcgatctcccccccagatgaaccatatagccaagagaaaccatgaaccagaatagaagagcttgccccacccatgagtaaatatttcatagtagcctcattagaccgtagatctctcttggtatatccagacaataggtaggaacataaactgaaacattctggagctacaaagatagttattaaatcgttagcaccacataaaaacattccccctagagtagctgttaatacgaataacagaaactctgttatagccatttctgtacattcaatgtactctacggatagaggaatacataaagttgaacataataaaataagaaattgaaagatttcgttgaaattgttcgtttggaaatttcccgaaaagctaattataggttcttctctccatcggaacaatagggccgttatgcttattactaaacttggtgaagagatgaaatagaaccagggtctatctttttga

SEQ ID NO: 462426 - DNA, 666 bp, Sorghum bicolor
  unsure (1)..(666): unsure at all n locations
gtacagttgntcatcacattctatctcatcgtatcacattctgttctacgattccacttcgacaaaaggaaagagcatacccaagttcaatagctttacgtccgctattccgatcatgattttcctaccctcagggagaaagtaaaggtccttccccctttggaaggctgtgggcgaggagggattcgaacccccgacaccgtggttcgtagccacgtgctctaatcctctgagctacaggcccaccccgtctccactggatctcttcccggggataccccccaaaaggaaccttcttctcctcagccatttcatttcgggttaagaagatgggaaagcgcctttctctctataagaacagtgcgttctgaggtgtgaagtgggagagaggggatgattgaggttttgaataagacgacctttgcgttttggatttggatctttttcgtatttcaaaatagtgaaaaagtaaaataagaggtgttaagctttttatcattctggcatcgagctattttgccgcaggacctcccctacagtatcgtcaccgcagtagagtttaaccaccaaattcgggatggattggtgtggttcctctacgcctaggacaccagaatatcgaaccatgaacgagaaaaggcatgagagaaatattggctagtaatt

SEQ ID NO: 462427 - DNA, 669 bp, Sorghum bicolor
  unsure (1)..(669): unsure at all n locations
catcaagtctgtttttcttaatgaaattgaaattattaactaacagagcaaacacaaatgaanggcgactttgctgaccatgatagatttttatctagttggaagagtcctcttaatattcatctagtcttatataagtttgggtatatagaaatacaaacagaaaagagaggatagaggataggctcattacataaaaaaaagatatggagggtgagccataatacataacaaaaaagaaaaaaaaggagcgggagagccaaatgaatcgaaagattcatgtttggttcgggaagagatcataaaaattgtaaacttaatagcaagataatctactttcattaaaagatttattagataatcgaaaacagaggatcttaagtactattcgaaattcggaagaattgcgtagagggacccttgaacaactcgaaaaagctcgtattcgattacagaaagtcgaactagaagcagatgagtatcgaatgaatggatactctgaaatagaacgagaaaaagaaaatttgattaatgctacttctattagtttggaacaattagaaaagtctaaaaacgaaacccttttttatgaaaaacaaagggcgatgaatcaggtccgacaacgggttttccaaccagctgtacaaggagctctaggaactctgaata

SEQ ID NO: 462428 - DNA, 620 bp, Sorghum bicolor
gtacagttgttcatcaattctttagcaaaatcaagatcattttctagcggcaacgagcatccaaaaccaaaaggtttttctgggcaacaagcaaacaaataataagattttgaaataatcagaattgaactatccaaaaaaaaattccaattatttaatatgaatgaataattcagattaattaataaatgtacttttatgtgtcgaatttctcggtacaatattcttagaacgaatccctccattatcattatatagaacaaaagtttttggtatattgtgtcctcagtattcttttcctatcaaagaacctttttttatttataatagaatcctcataaaacgaggattctattataaaaagtagactattcttgcaataggacttacaacctctacctaatcttatccaaaattcccatataaatgagtttaggactggtacatcatattaataagagtgtaaaggctttcattctataaatttttctaaaatacaaaattcatttcattgtagttaatgatgaacttctaatgttcctaaactctatagcctctcccagtctcgacgattcacgataaaataactattattcttttaaggtaactattatttaaaa

SEQ ID NO: 462429 - DNA, 689 bp, Sorghum bicolor
  unsure (1)..(689): unsure at all n locations
gtacagttgttcatcatgaaggatttgattactcaatattcgattggaatagattcacaataattctaaaaaaattatgaattttctatttcataatcattcctaatttcattctcaaaataaaataaagaacctatattataatatgggttctgtgattaatcgttattacttcgattcgttagaacagcttccattgagtctctgcacctatccttttcctttgggttctagtttgagaaccacttttttgaaaaaagtggatttggctcaggattgcccatttttcattccagggtttctctgaatttggaagttaccacttagcaggtttccataccaaggctcaatacaatcaagtccgtagcgtctaccgatttcgccatatccccattttacttttctttgaaaccaggattccttgtataatttaatccatcttttagttttttttgaatcattgaattcattattcgacgtagtctagcaactcatctttatttgagacaccccgctcgcttattgcaattcagaattgaattgattntatcgttgatatatttgcaattcaatcggaatgaatatatccaaaagtttttctctctcccgcctccctccttccttttttagagtattccaaatcatactataacgcttgatattcattcttttttttctaagctgaatta

SEQ ID NO: 462430 - DNA, 644 bp, Sorghum bicolor
  unsure (1)..(644): unsure at all n locations
gtacagnattttcatcaatctatactacctaatattgtcatgatatcagccaatttcatttttttaactagctgaggaagaatttgcaaattaataaaacccggtggacgaattttccatctccaggggaaaagactatcatctcctaccagataaattcctaattcgccttttggagcttctactcttacataaagctcttgctttgataattcaaaattgggcgacggttttttaccaagaaatcgatattcaaaatcattccattcgggattctttgctttcttaaagcgtcgggcttctaaattctcataaggtcctccaggaattttctctacagcctgttgaattatttttatggattccctcatttcaccgactcgtactaaatagcgagctaacgaatctccttctttttgccattggactttccaatcgaattgattgtaagactcataaggatcgattttacgaagatcccattgtattccagaagctcgtaacattggtcccgataagccccaatttacagcttcttctccgctaataaaaccgactccttcaactcgttctaaaaaaatgggattccgtgtaataagttgttgatattcaacaactccttgtaaaaaataatcacagaaatc

SEQ ID NO: 462431 - DNA, 608 bp, Sorghum bicolor
  unsure (1)..(608): unsure at all n locations
atcaatacaggtagggctaaaataaaaaaaagagtcaattttcaccatctctataatggggaaaggcccttttttccccggaggttgtcggaattatttgcaataaaatattggctacaatcgaggaggtcttatcaatgaaatttccatttatacgggatctaggcataattcccaacccattctatatagaattcttttcattctaggggggataacataaaaacaaaacactcgattcttataaatcgatccatatgctctaaatggaatggataagagaggtatggattttccgctcagctcaaattgtctccttttccttctgtttggacaagaagagatatgaaatatttgactaagactggatttcattccactttcctatttctcaacaacaacttctctcatcagctatttcgcgttttcaaagtaattaattgccccataccccttttatatttagattgtatggcgtaatgtaccttatgcaaatagaattctaggggttcctttatttncttatggaataagaagaatncttccattctctttntattnnttgtntnccccaaagaaaaacttttcgaggaagcgggattcctaat

SEQ ID NO: 462432 - DNA, 268 bp, Sorghum bicolor
  unsure (1)..(268): unsure at all n locations
tacagtagttcatcacttgtagtcataaccgtagaatagatcctaatcgaaatgcatacatnttggttcatacgctattggtatggtaagaagagatgtattttacagactagagaggggctatctaaatcctaaagtaaagacccgcgattgaagtaccaatcgcccaccgccatgaactttctcctttgattcgataaggtggaattagccctcttcttggatggctaccctttgacaagggtagcattgggatcataatctacat

SEQ ID NO: 462433 - DNA, 668 bp, Sorghum bicolor
catcataaaattgcaaaaaaaaatgaaattggactctttttcctgttatagcaatcaaatcaataccggtactgaactaatttagattcctttttattagtctattcttattctataccctttaaacgaatttccttaaccttaaaaagcttaaaaggtaggggatgatccgtgaattaacctaaccatcaactaaaaaaaatagcatagggggggagtagtaaagactcttttctttgatctagttcgaagagtatattgacaattccaaaaaactgctcatactatcattatagtataatgacgagtggttgtatacggtgctatcgtctagtgatgcccccatcgtctagtggttcaggacatctctctttcaaggaggcagcggggattcgacttcccctgggggtagggagtattataaaaagaggttaatcatagattatcaaaaagcctagaataaattcttcctgggtcgatgcccgagcggttaatggggacggactgtaaattcgttgacgatatgtctacgctggttcaaatccagctcggcccaaaaatttagggcttagtgaatatgaactaaatccattattttttatggaataaaaaaaattattatccatagaaataaaggataaagagaaacggggaaattgatttctaat

SEQ ID NO: 462434 - DNA, 568 bp, Sorghum bicolor
tcatcataaaatactagtgaaaagcccatatgcgacgaagattttttgttgctgtgggaataagaaaaagtccaaatcccatgtgacataataactggtagtgggagaagaggaattacccaggcatattgatatgtatgttccataagaaaagaaatagcaatttttagtttaaatttatagttcaatttttctctaaaattgtttccgattcaccaaacctattcttatctctttctaaaggaattcaaaaaacaaaataagaaaaagaaaaaatactggaattctggatttttcaaatttctctcattaaaatattccaaaattaagaatgggtttagctacttaaattcaaaaagtgaatcaaagaatttcagtatctagttattagttaaaaaaaaatatatttattaaaatacaaactaatcatttttgtatttctttctgttaaaataaaagagctctgatgtttcgtaattgattgattggattccaaagaaaacctatatttataggaaattctagaatattgcttatttcatataaaaggaaatcctaatgactcgaa

SEQ ID NO: 462435 - DNA, 628 bp, Sorghum bicolor
gtacagtttgttcatcataaaatactaggaaaagcccatatgcgacgaagattttttgttgctgtgggaataagaaaaagtccaaatcccattgacataataactggaagtgggagaagaggaattacccaggcatattgatatgtatgttccataagaaaagaaatagcaatttttagtttaaatttatagttcaatttttctctaaaattgtttccgattcaccaaacctattcttatctctttctaaaggaattcaaaaaacaaaataagaaaaagaaaaaatactggaattctggatttttcaaatttctctcattaaaatattccaaaattaagaatgggtttagctacttaaattcaaaaagtgaatcaaagaatttcagtatctagttattagttaaaaaaaaatatatttattaaaatacaaactaatcatttttgtatttctttctgttaaaataaaagagctctgttgtttcgtaattgattgattggattccaaagaaaacctatatttataggaaattctcgaatattgcttatttcatataaaaggaaatcctaatgactagaattctctaagttttagaatgtcttggttaagagacttggaattcaattatgc

SEQ ID NO: 462436 - DNA, 337 bp, Sorghum bicolor
  unsure (1)..(337): unsure at all n locations
aaaaaacggggggggagccncgaanngaaagagaganngagagggaccaagaanccnaanncncgcnannnggaangganccaanncnanngagncngacccanagngancannncncnnnagcaaagaangaccnnggnnancaaagganngaacaaccgagagccannnacnnanganaccnagnngacanngcnaacaaggancnaangaannangagnnnaanaganccncnnnagcagaaagacgnaaannccnngcncaaaancagacaancacnnanncccaaaccncgngnggggccaaacgnnnncaaaaaccancncaaggaaaacc

SEQ ID NO: 462437 - DNA, 458 bp, Sorghum bicolor
attcttttctttatggtatagaaagaggtgagattaggtgcccttttcttcattttgcatttcttattaattttgtatgccgctattccgaagaatattttttttattcttgcttatcctactttcctagttgttctaagtaatatgcgcggtacaaagttcgtggtaggaacttctttgagtcattgtatttttctgttcatacgaaggaaacaaatatgtgattttccaaattggaaaatcgaaatgaagccctttttgttcagtctatctggacctttttgtataataggaattaattagaatattatattctaagtatttcgcttcgcctaggaacagaacctcaaaatattcctttactttaataagatctggaattgtggtgtatacgtgaacatgaatttatcatcactaaatgagcattttgtattgcatagaaactgggggtgatatag

SEQ ID NO: 462438 - DNA, 615 bp, Sorghum bicolor
  unsure (1)..(615): unsure at all n locations
catcagcaagttcgaacgaattgactattcgtgtgataaattctttgagttaacttgcgtgttgtgcatgagaaataaaattgacaagtcgaagttggagattatcctcttcttgcaggagatcctgcgggaaaagtgttgctaaatttctcccttcgtccatttcatatgagactgcaggtcgaaccgaaacaaaatacttttccttgcgtggtgagaatttttttccgttgaacataaacccaatttttccttttttttgattccttagaatcttttttttctctttctgggggtatcaaactgccacctaatatcttatccgcctcttcaggaaaatgaatatctccggaaaagattttgagttctgtatggcttttttttctcttcactcggaccaatccacctagncgacttcttgtattttttgtgagttgtgtatcgactccaataatactattggcaagtacccttagggatgaggatctcggcaagatatgcagntcttgaagaatgaaaaaaaacccatctacttctttatgggattataaaccaaacatctttggttccttgatgcccaataaaaccctcttttcttaagatagaatcttcctc

SEQ ID NO: 462439 - DNA, 638 bp, Sorghum bicolor
catcatgctagagacaaaaacagtcatggatagttatatttatggtatccttccaaatgggataagagaattcttactactctctttctttctctcaattgaagaagtaattggaaaataaaacagcaagtacaaaaatgagtaataaaccccagtatagactggtacgattcaattcaacattttgttcattcgggtttgattgtgtcaggggtctatagttggaatttggtttatcgttggatgaactgcattgctgatattgatcccaagaaaaaaaccgtgggtacagctaatccgtgaacagccagccatcgcactgtaaaaataggataggttcgatctatggtcattgggggcctcctaaaaggatctactaaattcatctagttgttctaaagaatcaaaacggtcggttattaatggaattccttgtcggctttccgtgaaatactcgtttggtcgaggacttccaaacacgtcataagctaaacccgtactgacaaataaccaacccgcaatgaatagggaaggtatagtaatgctatgaataacccagtatcgaatactgggtagaatattagcttttgaacgttcttccgtgcttccagacatgctgagctcccaaattcttattc

SEQ ID NO: 462440 - DNA, 418 bp, Sorghum bicolor
catcatgacgtagctaccgagatcaatgcagttaattatgtctctcctagaagttgcctagcgacgctcccattttgttctaggattcttcttttttgtgggccatttgtggcatgcaggaagagcccgagctgctgcagcaggctttgaaaagggaattgatcgtgatttggaacctgttctttacatgacccctcttaactaagattttgtatttatacctgttctagtttttttctgttctggctcggctattccatctagccgagccatgcatgcttttttatgaatgtatgatataagggggctgaacaaagagaaacataaatagattgattcttttgttttcaatatacaaaaggagagagaggggttcgaaccctacaaagtacctaagaactatacatgtttttaagac

SEQ ID NO: 462441 - DNA, 631 bp, Sorghum bicolor
catcataattgttggtaccaaaaaaagagcagcggatttagtagcatcagctgcaataaggtctgggtgtcattatgttaataaaaagtggttcagcggtatgttaacgaattggtcgattaccaaaactagactttctcaatttagagacttaagagcagaagaaaaaatgggaaaattccaccatctcccaaaaagagatgcggcagtgggggaagagaaaattatctaccttgcaaagatatctcggcgggatcaaatatatgacgaggttgcctgacattgtgatcgtccttgatcagcaaaaagagtatatagctcttcgggaatgtgccattttggggattcctactatttctttagtcgatacaaattgtgacccagatcttgcgaatatatcgattcctgccaacgatgacactatgacttcaattcgattaattcttaacaaattagtatttgcaatttctgagggccgttctctctatataagaaatcgttgattaagaagaatagttaattcttgagcatctgcgtagatttataggattaattactattattttttgttttgcatagataaaagaaggggaatattgatatatattagagggtattggtatatattatg

SEQ ID NO: 462442 - DNA, 600 bp, Sorghum bicolor
  unsure (1)..(600): unsure at all n locations
catcatacgagatttagattaattgaattcagtataagttcaagacatattanagctcggcgatgtgtcggcttgtgatcaatccatagataccaatcgaaaataaatagacactcaaaaaaagtacatgctcaaacatcattaactaactccttatcaatctcgattcatttcaatatgaggacaagaattgaaccgattcaattaaggggagtagaacaattacacaacaaataccttcttttctcttttgttgtgttggcagtagatgggttttactaaatcaaaattgtgattctttagttatttattttatatttgaaattctaagaattttgactcattctaagtatttcttattgtcgagccatagtaattgcacctattaaagaaactagaagaattagggaaatgagttcaaacggaagataaaaatcggttgctaaatgaatcccaatttgttgaacgttatttatgagaccctgttctactatttggtttgatcttgtagtccaaagaattccataccacgacgtatctgggatagtagtcattagtgaaaaaggaatagttatacaaaggagtaaagtaaacccatct

SEQ ID NO: 462443 - DNA, 422 bp, Sorghum bicolor
tgttggtatcaatctgttaggaataggtttacatagttacggtgtcatttacattaccatctaaataattacataacataaaaccttcgggttttttccttttttggttgatttgagaaccctttgaaaagacgttcatggggttctcaagcattcgagatagatctagttagacttttttactgtgatctactaatatttaacgagcccgactctgggatctagtagatgactgagagattacggagattctgacccagcttaatcttaggagatttgagcctataccgtctcaacggatcgagagagaacagactcggcatggataccaagtcctatgactggtaaaaagatacagatataaagaaagagttcccgtggtccagaatctacaaagtttgttgtttggaactcgaaatagc

SEQ ID NO: 462444 - DNA, 633 bp, Sorghum bicolor
caatcactgactcaggcccattgtcgaatcctactcagcaattgtcgaatcctactcagccaaaaaagggggtacttatgtatggcagaacgggccaacctggtctttcataataaagagatagacggaactgctatgaaacggcttattagcagattaatagatcatttcggaatgggatatacctcccatatactggatcaaataaagactctgggcttccatcaagccactactacatcgatttctttaggaatcgaggatcttttaacaataccctctaaaggatggttagtccaagacgcggaacaacagagttttcttttggagaaacactattattatggagctgtacacgcggtagaaaaattacgccaatccgttgagatatggtatgctacaagtgaatatttgaaacaagaaatgaattcgaattttcgaataacggatccttctaatccagtctatctaatgtctttttcaggagccagaggaaatgcatctcaggtacaccaattagtaggtatgagagggttaatggcggatcctcaaggacaaatgattgatttacctattcaaagcaatttacgcgagggactttctttgacagaatatataattttcctgctacgg

SEQ ID NO: 462445 - DNA, 615 bp, Sorghum bicolor
aaggtgtattttgagtataccgaattagtatagctatccttcctatgtcacagcggtccaggtttgcttggtcccgaaacagaattccttttttctcttttttgtttcttgtctataggaaaattacatgttattcaaggcatcaatagaaccccacaatttttttggtcctacttattttcattgtcttcggaatagtagaatgggggaatttggaatagcggccaagatcttgggaaaacctaagttaatgattaataagataaagaatttaggaaggatattctcatattgacgcaatacaaagataagtatatgcaaaatctatccctttttagttaaaggaatttaattggttagcataaaataatatctaataaatagaaaatcgaatagtggataatccgttatgaaagaaacggaatacattctttgaagaatcaagattcgtaatcaatccttgtcttgtttggtggattaggtctaactttcttgaccaaacagcaagcatggaactttacaagaagaacttaaaagaaaaggataattgaagtaacttcgaatcaacttttgttgggggtcaaaaaacgaataaaaataaaaaaaaaagtaaat

SEQ ID NO: 462446 - DNA, 679 bp, Sorghum bicolor
  unsure (1)..(679): unsure at all n locations
aatacgttttgaccagaaaagcccatgctcgattatttcgagcacaggcttcttcggtaaagaggaatcagacgattcaagtggagttttttgtaacgtatcaataagatagagccatgctgcgggttgtttcagaccttaaataaacgcggacacttaaaaaatccgttgggcaagcagattcgcatctcttacaacccacacaatcttcggttctcggcgcggaagcaatttgcttggctttacatccatcccaaggtatcatttctaatacatctgttgggcaagctcgtacacattgagtgcatcctatacatgtatcataaatttttacagaatgtgacattggatctctaaatttgccttttcaacataaaaattttcgatctggtaaaaatgaaattagtactatataaattagatgtattgtagacaccagacgaagcaatggtttatccaaactttaacaaataatgcaatatatttcgtaatctgtttgtgagaaagcgtgaaaagagccaagagacttgaatttaaggcttcaacagtcataattatacgaattctacatacntaattcgaattagccaataaattggctatcatcttttcatataaattattgctatattcaaattgcaatattcaatgaattgcaaaattgcaatattcaataagt

SEQ ID NO: 462447 - DNA, 659 bp, Sorghum bicolor
tcatcattattttatgctaaccaattaaattcctttaactaaaaagggatagattttgcgtatactgatctttgtattgcgtcaatatgagaatatccttcctaaattctttatcttattaatcattaacttaggttttcccaagatcttggccgctattccaaatttaattattctactattccgaagacaatgaaaataagtaggaccagagggattgtggggttctattgatgccttgaataacatgtaattttcctatagacaagaaacaaaaaagagaaaaaaggaattctgtttcgggaccaagcaaaactggattgctgtgccataggaaggatagctatactaattcggtatactcaaaatacacctttggtacaaaattgacaatctcacgaggatgaaatatcagtaactttctatttactggtggatcccatcttttacggaatcaattccttttttgaataaaaattttgggagctcagcatgtctggaagcacgggagaacgttcttttgctgatattattaccaggattcgatactgggttattcatagcattactataccttccctattcattgcgggttggttatttgtcagtacggttttagctaatgacgtggttggaaagcctcgaccaaaccagtattt

SEQ ID NO: 462448 - DNA, 388 bp, Sorghum bicolor
  unsure (1)..(388): unsure at all n locations
aaaaacactagcttcnnaaannaaaacgtttaaaaagannnnnnnnggaggggggggaaanaannncccagaanaaccaangnccgnnaggcaccnaanccnnangncanaanaganccgaacacnngccnngganngacnncaanananaanngcnccagngaanaacnaaaaaaaaanagaaggacggnaganaggaaagaaaaggaccaancanaanancnancnnnaaaagaaacaanaaaaagacagnnggcgggncncnnngnangncnngnccggaaagaggaggacnnaangannannncgccgncggaaccagaagnnaaaanngcngnnggaagggaacccgnaaaaacaacnnnngaggaaagggccagacccgggc

SEQ ID NO: 462449 - DNA, 59 bp, Sorghum bicolor
  unsure (1)..(59): unsure at all n locations
gggacggagnggaagaagggcggagacccccgaacgaggaaaaggaccccnncgaaaga

SEQ ID NO: 462450 - DNA, 498 bp, Sorghum bicolor
  unsure (1)..(498): unsure at all n locations
accgaaaatagcttttacgccaaaactcagcgggganagccaaccaaataaaaccantnnataaataaggaataccgaaacaaaaacagcnattggaccagagaatgaaattgcattataaggccgcaattgaacagaccgagcaagttcaaattgacgtancataaaacttattantgcaagtgtgtgatgnatancnacaaaattccaaaaaccacataattnacaccaacnantaaaatccccctttccttccnntccccatantancaacaaanantntnctaaactattnncanntntnnaaaccnccncnnttaanaaattncaaccttncaaatannaactanccaatccatnnntataccaanaannnacaaaantannccctttaaaccaaccccctaaancnaaataatctcaannaaaaaacaataatccnnaccatcctacaaaaacaaaacnnncccttcttaaccatncctccataatatcaaa

SEQ ID NO: 462451 - DNA, 344 bp, Sorghum bicolor
  unsure (1)..(344): unsure at all n locations
catcaggacggtaagtaatactactcctagacctcctagtagaagaacaaatcccccgggggtcagatggatctcatgtattagtccaggtaaatccattatggataggaagaaatttctagtataaaatttttcatgaactgactaaaactaagagattcaagggaggaaacaggtattaggatatttttgggtctatgcatataaggggggggggagtcnttctttttttttcctcatagatagtaaaaaaggagttagctaataaaaaaatcctaatacctagtaatcctgaatcgttcttgaatgacaagattcttatccatctattttacttttaggcg

SEQ ID NO: 462452 - DNA, 501 bp, Sorghum bicolor
  unsure (1)..(501): unsure at all n locations
gtacagttgttcatcatcccattcatcgccagtatacccctcgtcggccaattccttccattcaaccaaagaattctctatagtactacgcgaatgctaaatccgcttattgcatctctaatagcacgctgctcctgatgcatttccccgatatcgaaatgttgcgaaagcctggcgtagaaaaagagggagaaatacatgtggctacaggctgaaatatcatcctcgaataaaccccgatatcataagaaagcaggttatgtagcgctgggcctagcaagagagaaatcaccatctactatgccctccactgtcttaaggggattatctaaaagattcgcaatataactaggaagacctttcaaataccacacatgagtcactggacatgctagtttgatgtatcccatttgatatcttcgtatccgagaatcaacaaattctaccccgcatttttgacaaaatctttcgtcttcgttttcagctacncttgctcgagag

SEQ ID NO: 462453 - DNA, 661 bp, Sorghum bicolor
  unsure (1)..(661): unsure at all n locations
catccctgtaaaccaaccccctaaagcgaaataagcacaaggaaagagcaataagcgggaccatcctacaaaaacaaaacggtcccttcgtaaccagtcgtccataatatcaaatagatcgttttcttctttagtaactctaccaacggctatagtcatagtgatcctcctattcaattacttcaaccattttcgagcacctcatatgacttccagggcatacgatagtttgattatctgtggacgatttctttctcgttcaatgccctttttcagtcgtctcgaagatagaaattttgcatttttatctatggggtcacaaccaaggtcgtgctaaatccacgaatttcatttaattcatttttcttatactatagaaaagaaataaaagaaaagaaataaagaaataaacatttgaattcagcattattccatgatttctatttcaaagcctattttttaagggaaaacccctcttttctcattcgctctctattgcatgggtggaagaacanaaatagaataggattctgaaaaaaaaagaaagattttgaaaagaaaaattgacttttgaaaccctttattcattatgtgtaacggaaaagagttgcgatttctttttattcctatagaacgtctagtaacaagaatatgaaatcgt

SEQ ID NO: 462454 - DNA, 413 bp, Sorghum bicolor
  unsure (1)..(413): unsure at all n locations
gcggatcccggaatnncaacaanaaannagataggnagctaagctaagggaggggcctatacacgagncngnngncanncnacggcaanagnngnaccagaaggangaanaccnngagcaggnagaaanagaaagaannnngnnaaaaaggaaaagggcnnncnnncnaaaggaagaaanangcnaannngannaanaggaggaaancaaangagngagnnnangcnncacnaanngaanganaaangacnacaagngaaggaganagacggnnnaaacaaaaaaagacccaaaannncaaacacgngncnagaancacaggaaaacnacaaacaaaaanagngaaaanaagcncgnnaggagcccaaccaagaagggggnagacccaacgaanaagaaggncccaaccgcgg

SEQ ID NO: 462455 - DNA, 608 bp, Sorghum bicolor
ggtacagttgttcatcatcataaaattgcaaaaaaaaaaaatggagacattttcaaaaaagaaatgaatgaatttaggagaaaagtactttatcggattcgaaccgataacttctgtcttaccaaggcattattctaccactaagtgaaaagccctttatcggatttgaaccgatgacttatgccttaccatggcattactctaccactgagttaaaagggctgtttattcaataattagccactttcatttaccattatgggtctactgcataatgtacatattatatgtatatattaatgtacataatatatacatatatagagatatgtagagattttcttttctatatatcttgatctcgaagtttttttatggcgagatttaaaatcttgagaaaattaagaaaaataagaaaatctttcatattatctcttatcacttgcacaaagtataggtatttattattatataaataaatacatatacatatcatgtataataaaatacatgaacagagagttgacacacccaaaaattattatatatatcggatacatttgaagaggctaagttcataggtatgtaaacatgatctcgtacgactc

SEQ ID NO: 462456 - DNA, 663 bp, Sorghum bicolor
  unsure (1)..(663): unsure at all n locations
gtacagttgttcatcatttgaataggtaaatcaatcatttgtccttgaggatccgccattaaccctctcatacctactaattggtgtacctgagatgcatttcctctggctcctgaaaaagacattagatagactggattagaaggatccgttattcgaaaattcgaattcatttcttgtttcaaatattcacttgtagcataccatatctcaacggattggcgtaatttttctaccgcgtgtacagctccataataatagtgtttctccaaaagaaaactctgttgttccgcgtcttggactaaccatcctttagagggtattgttaaaagatcctcgattcctaaagaaatcgatgtagtagtggcttgatggaagcccagagtctttatttgatccagtatatgggaggtatatcccattccgaaatgatctattaatctgctaataagccgtttcatagcagttccgtctatctctttattatgaaagaccaggttggcccgttctgccatacataagtacccncttttttggctgagtaggattcgacaattgctgagtaggattcgacaatgggcctgagttattgattcgaaaactttatttactccctttcctcaatctcaatctggatttgcgcgggaaaaaagatgggactag

SEQ ID NO: 462457 - DNA, 156 bp, Sorghum bicolor
  unsure (1)..(156): unsure at all n locations
acagcagggcggatggcccctttggcccgnnaggcccccagggggggccgaaacaacaaangaaacanaccggggcgccgcgcaaaaaaaaaaggaaccaccaggccgcgcgcgggggcggggagacgnacgagaccaaggggacacacccaagaa

SEQ ID NO: 462458 - DNA, 635 bp, Sorghum bicolor
agtttgagagtaagcattacaaaatctccaaaaatttttttgttaaggaatagattacccatttttccttaccacacggatccactagaatgggttttctttattttgacacctaaaaatgcaaaaatcaattcttaaaaaaattgcaagaattgatttataataagcactcttatcattagtttaggtattgtgtgggtacctaaaggtacgttcaacgtaggcgcagggggtagaaaggctgatcaaaatttattgctgcagctatacattcaatgtagaagaatttgaattttagaatcgaaggttcataatataagacttctcagctcttatccatttttttttttggaatgaatacatcattcaatttggcaggcagaatagtaaagatttcatcgaaaacttacagcagcttgccaaacaaacgctaatagaaaaaagagtacaggtatgacaggcataacatccacgattgggttgaaaatggcataagcttcgggtaatttggcgaagaaaaagctagtcggacaaagaacagaattaaaacagatacaggttaaactaagtatattaggcataacaagcatttcattcttgtagagtagataattggattttgattgagttatttt

SEQ ID NO: 462459 - DNA, 625 bp, Sorghum bicolor
catcacaagcaagttagacctaatccaacaaacaagacaaggattgattacgaatcttgagtcttgagagaatgtattccgtttctttcataacggattatccactattcgattttctatttattagatattattttatgctaaccaattaaattcctttaactaaaaagggatagattttgcatatacttatctttgtattgcgtcagggggagaatatccttcctaaattctttatcttattaatcattaacttaggttttcccaagatcttggccgctattccaaatttaattattctactattccgaagacaatgaaaataagtaggaccaaaaaaattgtggggttctattgatgccttgaataacatgtaattttcctatagacaagaaacaaaaaagagaaaaaaggaattctgtttcgggaccaagcaaaactggattgctgtgccataggaaggatagctatactaattcggtatactcaaaatacacctttggtacaaaattgacaatctcacgaggatgaaatatcagtaactttctatttactggtggatcccatcttttacggaatcaattccttttttgaataaaaattttgggagctcaacatgtctgga

SEQ ID NO: 462460 - DNA, 611 bp, Sorghum bicolor
actggaaatcactttttcttctttgtcatctcaatagaatagaaagaaacgggaagttttctagtgttagcaatgtgtgttttaagatagaatccatcgaggagaataagcgaaactggatccaaaaaagcagaaatcgattttttgaaaaagattcgaaaaaagaaagtaagtagaattagattcaagataaaagaaaaaaaggttttagtaattttagtaattagtaaaaaaatgtggatgaatacttgctcttttctcgattttagatcggattttttggcggcatggccaagtggtaaggcaggggactgcaaatcctttacccccagttcaaatctgggtgccgcctgatcaataaaatacttaggattatagtactgatcaaactcgacaaattcgtacccccctaagttggggcacgagagtaactaggtttggcgatactggattttgagaatccataccatagttctaccctcaaactagggtttgttttgtgggcagtggcccaaacggttaccaatagggatgaggtagcgtttccttattcttttattaatttaaatcgattcgattcgggaatttaaaactacgagactaagatgtca

SEQ ID NO: 462461 - DNA, 347 bp, Sorghum bicolor
  unsure (1)..(347): unsure at all n locations
caggagccggccgnnaganaggaacagcnnngcnaaanacngagaacncgcgcgaagaggannagaaagaaaagaccannaannananaaggaagaacccagggnncnagcccanncccagggggggggcacnaanncgnagggcnnnngccnnncnngcgnacnccngangaaccagnngcnagccanangnnnaggaggcnnnnnncnccaggnaccggnaccaagccgcnnngccancncnncaacnncagcggcaaagaagccgcgacgngaaaacacagagacaaaggccngancnangaanaggaaaaagaangganccgaagggcccaaancaancggcc

SEQ ID NO: 462462 - DNA, 248 bp, Sorghum bicolor
  unsure (1)..(248): unsure at all n locations
aggaaatctccacatacggctcttttaaatgatncgttttgcggggtggggggcaaatagatagaaattcaattctgacgggcattaattcccttaaacaaaataaaaaacaaacttcattcatactcatgactcaagttggctaattctgactgacaaactttaaaagaataacccttctaaattctctgagggtgcggggcactctttactatatctcatctcaaacaaaccgactcccaccccca

SEQ ID NO: 462463 - DNA, 576 bp, Sorghum bicolor
  unsure (1)..(576): unsure at all n locations
ggggggggaaaaaaccanancncacgaaacaagagaagccaaagccaaagaaaacaaaaacaaacccgcnanccacggagaaaaccggacaaaaaaaacaaccaaccaacggagaacacacagcaaagacacaannnaacnaaaccggtgtgggggccatcataagaatgaaacacaaatcgaaaaacaccaacaaaagagaagacacacggaccaaaaaataataattattaaaaaaaacaaactcaacagagaacccaaaaagaacaatccaaaaatgagaagaaacgaaccacaaaccacagagaaaccatcacccccaaaaaaaaaaaaaaaaaaaaaaaaaaaaaaaagacactaaaaaaacaaaaacaattaaccaaaaaacacacacacgcataaacaacaaaacaaaacaaagaaaaaacacaaccccaaatgaccaaaaacaaacaccacaaaacacagcagacaaaacaaacacaacaacccaaaagtaacaaaaaaaaaaaaaaaaaaaaaaaaagaaaaacaaattcaagaacacaccaacaaaaaaaaaaaaaaccgaacacc

SEQ ID NO: 462464 - DNA, 605 bp, Sorghum bicolor
ctaatagatggtacagtagttcattatgatagctcatgtcgtcgtgataggcgtccatccttctcatctccacgattgatcatctgcgtgtctctctagggcagaatggcatatccaatcgtagcattaaagcagtcttaagttaactctgttattcctctctttcgaactatgagtgattgatctgcatagacagaatatcgggttcacatataattgaatggtttgcagagtgttccgccgatccatacttatgtctttgatccaattctctccatagatagcaggtttgaattagtatacaaaagcaatgactattcatgattccatccatattggatcaattctcgataccattttgcattgaaattagaggaatgttatggtaaaacttcgtttaaaacgatgtgagagaaagcaacgtgcgactcgaaggacatgatcgattgtggattttgctatccatcattttccatagtaatgaaaatgctcttggctcgacatagtctgatctattcgtcccgaaccgaatgtgcgctgggttgtttagaagtaaagtaaatagtacacgatggacctcgagaggacagaatttctttttgatc

SEQ ID NO: 462465 - DNA, 689 bp, Sorghum bicolor
  unsure (1)..(689): unsure at all n locations
gtacagttgntcatcattcctacaagagtgaaacaaaactaaagaaagaaatataaagtttggcaaaattattaatgcaaaacgatcaattaaagaaaagagttgatactacaattcgactactcaatcaattggtagtatccctagagtccactcctcccccatactactagcgaaagagaaaatgtaaagactaccattaaagcagcccaagcgagacttactatatccatgtaaattatgtctcctatttctatgaaagaattcttctactattgatcaataatcatagtggaatcaagggtacagagtcaaaaggccattctattctgccctaagactatggatgaacccgttaaaggaatttactcctaacaaattcttatatgatttctggtagaattggagagcattaagtagaaatatgatacatcgctctttccctaaaaaagagtaggggatgctctgaatagaagacgcgggaatagagagattttttctttcgtttgttaccttttttataagcaaaggacgtaagaatataccataatattaggattaataaatatttattggatacctaacttacccatgtttatttttatttttgacctaaaccctactgctgccccgctttctatctttctatgaaagattaggaggtcttatcacattcaaaaattgatttt

SEQ ID NO: 462466 - DNA, 578 bp, Sorghum bicolor
catcaaaaggctaaatcccctcccctcaactccatatccaaataaaagcggtaaggaaaaatgttaataaaaagaagaatcaatggattcatgattaaacccctcctacttcttgtattttcgtacaattttgattaagtgagggatcaaatagaaatatgtagtcaactttatttgaaggtagtttggaggatcataaatatgactatggcggggcaattagctgtttttgcattaattgcgacttcctcagttttagtaattagtgtaccccttgtatttgcttctcctgatggttggtcaaataataaaaacgttgtattttccggtacatcattatggattggattagtctttctggtagctattctgaattctcttatttcttgaatttgtttagtatttagtaacccgatacaaaataaataaaaagaaaggcccttttttcgaaaaaattcggatttttatacacattaaaatgctattttcgttccgaattattacctattctctttcattattatgaaattctattgccattagaatattgattgatagacaattaataaaaagaaaac

SEQ ID NO: 462467 - DNA, 693 bp, Sorghum bicolor
  unsure (1)..(693): unsure at all n locations
aggtacagttttcatcactttttgtatactagtggaatttcattgtattgggttctttcttagatctaaatgggagggaatagagaaataaaaaaaaggccttttatataaaaatggaagaatagtatgccatatatctcacttggacaaaacaaattcgaagcaattttctcttatcctcgtttgttccttcctttagataaatactcgaaaatccccttacgggggcaaaaaattgcaattggtactcaaaatacttcaattggtacacccaagaaataggccaattcggcagctttttgttcaatttctcgtggagtaaaaaacttctcatcagtacgagtcaagggaatgaccccctggccccggatttccatataaaggatacgacgaggataaagaccctctttaacctgaattctaattgattggatatcccgcacaaggaattgaaggaagatgcgacgttttattccagggaatccccaacgaaaaatgcacactattccctcttttctatcgaatcggtcataaccactgcctacattccataaaatagtgcaccacanataggagctaatgaataggcccgcgattccgtaaaaagacatcacgaccccctgtggaaaaaaaagaatttgttgagatggaagtagagatatcatattcttaccaagataactggaagcccca

SEQ ID NO: 462468 - DNA, 369 bp, Sorghum bicolor
  unsure (1)..(369): unsure at all n locations
aaagaaacccagancccagggaaaacgagcaggcccaaanaaancganggggggaggagcgganccaaaccacaaaggaccggcaaccacgaaagcagcaaaaaaaacagcagcgagacgacccggaaagagacagggggcaaganacgcccanacgnaacccgnngacaagacgnngaggcgggcggacaccnaganggaagaggcccgcnaanaagcccaaagnacccgcagcaagangacgcgaagcaaaaccgaccggaacgaaaggancaaaaccngcagcaccccacgcaggaagcacagcnagnaccnncccagccagggcgncaggancggacacncacaacccagggccaaanaaacccg

SEQ ID NO: 462469 - DNA, 472 bp, Sorghum bicolor
ggtacagttgttcacacctgagagagagaaccactcaaccagatgcgctcccaatacccatgaaatgatgagtctgaggcgagaccctttctgacaacggatgctcctattacactcgctggctgggacgagtggaaacccactaggtagcatttacatcgactactcaagcattgcagacggcattagtccgactcgccggaggaactacccagaataacgagcgggcggaagggatctgtgcatcataaagagactaggcgtacctgaccctgcttcaccttaatagttatttgaacaaaccgatcacaatagaatcggtgggtaaaagtactgtgtaggccggagcggggatagactggctcttatacatgtatatggagacaggcaaaacccatacaccacagatagaggttggaatcgggcacacgaaccacactccatcgtaaacggaaggctcgaatccagagct

SEQ ID NO: 462470 - DNA, 678 bp, Sorghum bicolor
gtacagttgttcatcaccctctcgggggcttgcttaagaataagaaagaggaatcttatggaaatagcatggaataaggtttgatcctattcatggggattccgtaaatatcccattccaaaaatcgaaacaatcgggacttttcggagattggctgcagttactaattcatgatctggcatgtacagaatgaaaacttcattctcgattctacgagaatttttatgaaagcgtttcatttgcttctcttcaatggaagtttcattttcccagaatgtatcctaatttttggcctaattcttcttctgatgatcgatttaacctctgatcaaaaagatagaccttggttctatttcatctcttcaacaagtttagtaataagcataacggccctattgttccgatggagagaagaacctataattagcttttcgggaaatttccaaacgaacaatttcaacgaaatctttcaatttcttattttattatgttcaactttatgtattcctctatccgtagagtacattgaatgtacagaaatggctataacagagtttctgttattcgtattaacagctactctagggggaatgtttttatgtggtgctaacgatttaataactatctttgtagctccagaatgtttcagtttatgttcctacctattgtctggatata

SEQ ID NO: 462471 - DNA, 594 bp, Sorghum bicolor
tcatcattattttatgctaaccaattaaattcctttaactaaaaagggatagattttgcatatacttatctttgtattgcgtcaatatgagaatatccttcctaaattctttatcttattaatcattaacttaggttttcccaagatcttggccgctattccaaatttaattattctactattccgaagacaatgaaaataagtaggaccaaaaaaattgtggggttctattgatgccttgaataacatgtaattttcctatagacaagaaacaaaaaagagaaaaaaggaattctgtttcgggaccaagcaaaactggattgctgtgccataggaaggatagctatactaattcggtatactcaaaatacacctttggtacaaaattgacaatctcacgaggatgaaatatcagtaactttctatttactggtggatcccatcttttacggaatcaattccttttttgaataaaaattttgggagctcagcatgtctggaagcacgggagaacgttcttttgctgatattattaccagtattcgatactggggtattcatagcattactataccttccctattcattgcgggt

SEQ ID NO: 462472 - DNA, 628 bp, Sorghum bicolor
  unsure (1)..(628): unsure at all n locations
caaatctctngattcggaattagggactcatgttccgtctgatgaatcgattttgtgtttgtgtttacacttctgtatctcactctatcttgttttttagtattatctaaaataaccaatgaattatgaattttccataacttaaaacttaaacttaggtaagtgctttaccaacattatgtagtgtagtaaaaaaaaatggaattgaagcccttcatgcttactataactagttatttcggttttctactggctgctttaactataaccccagctctatttattggcttgaacaagatacgtcttatttgaaatgaattgaatgaatagaagaatctttcttttggattcctgatattctagactcttttccacactaattaccaattcttttcttggtcattgagattcgtgggtagtttagactattatttagagatagatcgtacctctttttttatcccctcgaacaaatcgaaatgattgaaggtnttctatttggaatcgncttaggcctaaatcctattactttagcgggattatttcggactgcgtatttgcaatacagggcgggggatcaggtggatctttgattggagaatatttcttttttgaatgacctcctctc

SEQ ID NO: 462473 - DNA, 595 bp, Sorghum bicolor
  unsure (1)..(595): unsure at all n locations
catcacgtcggtaagttaaactcgatagctatatgagtgaaacaaaacagcttattaatttgtanntgaaataaaaaatctcatttcctacgtacaagaaaaaagttaaagtaaacataagcagtgtaaactctttaccccaaggttgagattgtttaattagtcatcatatcttgaagcgggcaagaataaaggattcgcgatatggggggggggactagaatattttgagttattactataatttaaacttataaccataangcaatccatcaaaagttagtgagggattaggaacactaaagtacatacaggattagtaatgagagaatctaaatcattagacatttttcctcataaaaggaatcataataaggacttgaaattggtggaaatgatcaagcagtactttcttcagattccggtctagagtatgttcccattcacttgttaaggaaatggctatcaagaacgaattaaccctttattcttttttttaagtatacccctcccggggaaagaagaataggacaaaagatacggaatacaatacaaaaaaggatccttatttattctttcctttctttatccctat

SEQ ID NO: 462474 - DNA, 604 bp, Sorghum bicolor
  unsure (1)..(604): unsure at all n locations
tcatcatgttccatgaacaagaatttctttttttctccgaattaaatggggaatccagnntctgttatgtcgttttaccttacaattttgctagatacaaagcataaaaataaataatatatatacaaaaaatccagatgttgatgaaattccattttttgtgttactccattttttgtgttactttagtagattttactctgtttatcggggggttgaattctgtttgaatttcgctgtattctgtaatgtaaatagaacgaaatttattgtgtaaaatgaaatttcaataaaataaaaaaggagtcttcatgtcccgttatcgagggcctcgtttaaaaaaaatacgccgtctgggagctttaccaggactcactagaaaaacgcctaaatccggaagtaatcagaaaaagaaattccattctgggaaaaaagagcaatatcgtattcgtcttcaagaaaaacagaaattgcgttttcattatggtctgacagaacgacaattacttagatatgtacatatcgctggaaaagcgaaaagatccacaggtcaggttttactacaattacttgaaatgcgtttggataatatcctttttcgatt

SEQ ID NO: 462475 - DNA, 644 bp, Sorghum bicolor
  unsure (1)..(644): unsure at all n locations
aaaactaacctgtatctgttttaattctgttctttttccgactagctttttcttggccggggtgcccagaaacttatgccattttcaacccaatcgtggatgttatgcctgtcatacctgtactcttttttctattagcgtttgtttggcaagctgctgtaagttttcgatgaaatctttactattctgccttccaaattgaatgagggttcattccaaaaaaaaaaatggataaaagctaanaagtcttatattatgaaccttcnattctaaaattcaaattcttctacattgaatgtatagctgcagcaataaattttgatcaacctttctaccccctgcgcctacgttgaacgtacctttaggtacccacacaatacctaaactaatgataagagtgcttattataaatcaattcttgcaatttttttaagaattgatttttgcatttttaggtgtcaaaataaaaaaaacccattctaatggatccgtgtggtaaggaaaaatggttaatctattccttaacaaaaaaattttggagattttgtaatgcttactctcaaactttttgtttatacagnaangatattctttggttcccttcttatccttggaancttatctaangaccangacgtaatcct

SEQ ID NO: 462476 - DNA, 645 bp, Sorghum bicolor
  unsure (1)..(645): unsure at all n locations
tcatcagtattcgactccaataatactattgtcaagtacctttagggatgaggatctcggcaagatatgcagttcttgaagaatgaaaaaaaaccgatctacttctttttggtattttagactaaattcttttgttcctcgatgctcaataaaaccctctttttttaagatagaatcttcctccgggctcccatattcgtcttctgagtcttcctctgagtcttcctctgagtcttcttctaaagtcccatattccttctctgagccatcttcagagctcccatattcttcttctgagtcttcctctaggatttcatattcgccctctccctctcgggtcctatatttgttctctaggctcccatattcttcctctgagtctttctctagagtcctatattcgtcctctaggatcccatactcatcttctagggtttcatattcgtcctctagagtcctatattcgtcttctaggatttcatattcgccctctccctctcgggtcctatatttgttctctgggctctcatattcgtcttctgagtcttcctctcgagtcctatactcttcctctcgggtccgatattcttcctctagggtcctatatctaaatntaacaattcctgaaccccttttatcttttct

SEQ ID NO: 462477 - DNA, 628 bp, Sorghum bicolor
gtacagttgttcatcaatctatggggttattacttagaagtctattttgtacaagatcccctcctatctgatagaaaagggtcccatgatcccgagccggtcttatcttggctcgcaaaccccaagtttgtctatgaagagctaatctaattgtattagtttctataatggatttcttatgtggaatactaatggatagggcctcgttgctaagtgctacaagatctagtgcactggaactcgtggttatggacccgaatcctttagtatggaacattgtcttttccaagtaaaaacccctagtatatgaaagaatgaaaaggtgctttcgttcttgtggaataagaagccctcgtaccttaatgaaaggaaaataggaatttttcgttaggtatttgaccaaataggatcgtccagttcctatagaacctatcactaaaatacccgatagggctaagcggaacgaaaagggttttccatgagatggtaaatgaaaacgattagccccacacgaggtttgggaataagtgattgtctgataatgagcaaggaatatacgtctttctgctatagaggatctattaaactcataattcattagattcttgttagcaatgtcaactaggta

SEQ ID NO: 462478 - DNA, 405 bp, Sorghum bicolor
  unsure (1)..(405): unsure at all n locations
ccccaaaaggggacnncagcaaagaaccaaanacaacaccggggcgaaggggcaaanngggaanngaccnaacaaccccccccccgggggcccaggnancaaanacgccgccaaaanaaagagccccgagnacgagagggggggcaccnanaccnaacaaaannaanngaanacccaaaanngnagncaannaaaancaaacnnnccanacanaaccaaagaanggaaaagaaacnncaagagncncgggncccagaagcgcgngagaaaagccaccgaagccaaagacngcggaggaaaaaaagngaagnaccccggaaacaaagnaaggaaaagnancaagaacancnccccccggccccaccccccaaccaagagnagcnaagcgcggaagaaaaancaacc

SEQ ID NO: 462479 - DNA, 706 bp, Sorghum bicolor
  unsure (1)..(706): unsure at all n locations
gtacagttgttcatcactaagcaagttcgaacgaattgactattcgtgtgataaattctttgagttaacttgctattttcatgagaaataaaattgacaagtcgaagttggagattatcctcttcttgcaggagatcctgcgggaaaagtgttgctaaatttctcccttcgtccatttcatatgagactgcaggtcgaaccgaaacaaaatacttttccttgcttttgagaatttttttccgttgaacataaacccaatttttccttttttttgattccttagaatcttttttttctctttctgggggtatcaaactgccacctaatatcttatccgcctcttcaggaaaatgaatatctccggaaaagattttgagttctgtatggcttttttttctcttcactcggaccaatccacctagtcgacttcttgtattttttgtgagttgtgtatcgactccaataatactattgtcaagtacctttagggatgaggatctcggcaagatatgcagttcttgaagaatgaaaaaaaaccgatctacttctttttggtattttagactaaattcttttgttcctcgatgctcaataaaaccctctttttttaagatagaatcttcctncgggctcccatattcgtcttctgagtcttcctctgagtcttcctctgagtcttcttctaaagtcccatattccttctctg

SEQ ID NO: 462480 - DNA, 667 bp, Sorghum bicolor
ctaatagatggtacagtagttcatcagtgaaataattggttagatacattgactttctattcaaaaaaattagtggatccacttaaaataaaaaaaaactcgctatagtcggctacgcatatgcatgcatttatgctcgtagcttatatctgcatccatagacgttttcatttgtgtgtagaaagagctacataccctatcatattatactacttacacaaaaaaatatctgtattatgatcctggaaatacattgagaaaatttggccccgtcgtttctagacaatcttatttttctgcacataaagaaataaggaagtcattgcaattgccggaaatactaagcctactaaaggtacgaaaatagagggtaagttaagatctgtcatagaatatgtgtctcaattcaaatttactatttctatctattcgaaatatatcttaagattcttatgatataattaagtatatctattataaggaatattgactattgtattttttagtttaaaaaataagaaaattgcaaaaaaggggaactaaaaaggggaactcattaaaataaaatgttgaatttatcttttcccattctcatcgcctttctatccttctaatcgaacttgaaattggattcaaaagaaagctattgtgaaaataaaagaaatac

SEQ ID NO: 462481 - DNA, 613 bp, Sorghum bicolor
  unsure (1)..(613): unsure at all n locations
gtacagttgttcatcataactgagcgtttggattcttggagttatcgtgtcattagtctagggtttactcttttaaccgtgggtattctttgtggagcagtatgggctaatgaggcatggggatcctattggaattgggatcctaaggaaacttgggcatttattacctggaccatatttgcaatatatttacatagtagaacaaatccaaattggaagggtacgaattccgcacttgtagcttcgataggatttcttataatttggatctgctattttggtatcaatctgttaggaataggtttacatagttacggttcatttacattaccatctaaataattacataacataaaaccttcgggttttttccttttttgtttgatttgagaaccctttgaaaagacgttcaaggggttctcaaaaattcgagatagatctaattagacttttttacttttttcttaatttttaatttttccactctggaatatagagcggactggttaaaaaaagaaaattctatttagtataataattggataatagagcctntaccctattaacggatagagagagaacaaaatctggataaataccaatttctattact

SEQ ID NO: 462482 - DNA, 621 bp, Sorghum bicolor
ggtacagtttttcatcaaactattcttcttaatcaacgatttcttatatagagagaacggccctcagaaattgcaaatactaatttgttaagaattaatcgaattgaagtcatagtgtcatcgttggcaggaatcgatatattcgcaagatctgggtcacaatttgtatcgactaaagaaatagtaggaatccccaaaatggcacattcccgaagagctatatgctctttttgctgatcaaggacgatcacaatgtcaggcaacctcgtcatatatttgatcccgccgagatatctttgcaaggtagataattttctctttaagattgccgcatctctttttgggagatggtggaattttcccattttttcttctgctcttaagtctctaaattgagaaagtctagttttggtaatcgaccaattcgttaacataccgctgaaccactttttattaacataatgacaacgagaccttattgcagctgatgctactaaatccgctgctctttttttggtaccaacaattaagaagctttttccctgacttgctgcatcaaaaactaaatcacaagcttctgataaaaaacgagctgttctagcaagatttgtaatatgagta

SEQ ID NO: 462483 - DNA, 584 bp, Sorghum bicolor
  unsure (1)..(584): unsure at all n locations
atcactatcccttgatcacttatagtaccccaaacatcctactgcattttccaactgggatgggggatgactaccgaaatanaattgtacatccagaatagacctaagaaaacatgatcccaggcggatacttgacatgttccccctcgcccaggtccgtcgcaagggaagcgaaagccaagatttgctttatcatttatcagacgggagggtgggagcaaataaaacacctttcaaaagtattaatacantcacatggatggtaaatgcgtgaatgtgatggactaaaaaatccgcggttcctaatggaataggtaacaaagctactttgccgcctacagctactaactcgccgcctccccacgttaagctggtacttggtgttgcaccaggagctgttacgccaggcgcgccagcatggatattttgtatccattgagcaaagatgggttgtaattgtatggcggtatccgaaaacatatcttggggacggcctaaagcactcattgtatcattatgaatgtacaagccaaaactgtgaaaacccagaaatatacatacccagntaaggtgggatatgattg

SEQ ID NO: 462484 - DNA, 613 bp, Sorghum bicolor
  unsure (1)..(613): unsure at all n locations
gtacagttgttcatcatttgtaatatgagtacctttacgctttgccgagatgtaaggggccattttgggattccatttcttaataccatgaccaaaatgaactcccgcttctatcatctctttcaaattgatgttccaatatcttcttgtcattttttccacacttcctttttattttttcttttttcgtcttaccattacggaattaatttctttttgaagattaagaaagagccgaaatagcttgaaataaataataattgttccgatggaaccttctactcataattgaccattgatacacggtataaacatagccttaatgaattaactgacttcttttacttattcaaatacaattcaaatacaattcaaattcaaatacaaaatcgaaaatcagacctgttagcattctaaggtcaaaagtatagtttaaatttaagtaaaaaaaaattgctttatgtatacttaaatcgtataaataggggtaaacggngtctctgatgtttcatagaaattgtttgttacgtcagaatcagaagaaactaattctgtatggagaaacaaaatatctctcatttccgacgcgaatagatttttttttttaaatttc

SEQ ID NO: 462485 - DNA, 641 bp, Sorghum bicolor
gtacagttgttcatcatgtgtaaataccctaatatgggttcgcaatcaataacatcttcaccatcgagagtaacaatcagtcgaagaacaccatgcattgatgggtgttgaggacccatattgactatcatgagatcttttcttttaagcgatagactcatatccttgttcttattctttattccatgaaaatggattattccatgaattcctcaaaacgaggctcatcaaaatgcaaaatctaagactactataagactactaataaaataggaaaaaaattcgaacgattaaattacttctcccgaatatccaactgactgattaatttcttataacgtactctatttttctttgccaaataagccagcaaacgttgacgttttcccaaaagtcttcgtagacctctttccgatgaaaaatcttttttgtgtaattctaaatgtgaagcaagtctccgtatcttattggtgaaactgaatacttgaaattcaacagaacccctgttttcttgtttttcttctttaaccataaatcaacaaatttttctacctcctttctttttcatgtatttttctgatcaggaaaaataaaaaattatgtcagttatttttaagttattctaatctcgtacacacaaa

SEQ ID NO: 462486 - DNA, 678 bp, Sorghum bicolor
  unsure (1)..(678): unsure at all n locations
gtacagttgttcatcaacttttattccttattctgatctaattctattgttgagacggttgaaaatcgtgtttacttgttccggaatcctttatctttgatttgtgaaatccttgggtttagacattacttcgggaactcctattcttttttctttcaaaagagtagcaacataccctttcttttttcttatttccttcgataaagcatttcactcttctatagaaatcaaatatgaacaattgattcagatagacttttaatcaaaaaagtttttccaatcttccaaaattggactttttcttattttaaccttttgatttccatattaaggatagactgacaaagttggcctaatttattagttttcactaaccctagattctttcccttgatcaaaaagaaattctgtcctctcgagctccatcgtgtactatttactttacttacaaacaacccagcgcaaattcggttcgggacgaatagaacagactatgtcgagccaagagcattttcattactatggaaaatgatggatagcaaaatccacaatcgatcatgtccttcaagtcgcacgttgctttctaccacatcgttttaaacgaagttntaccataacattcctntaatttcattgcaaaatgggatcgagaattgatccaatatggatggaatcatg

SEQ ID NO: 462487 - DNA, 660 bp, Sorghum bicolor
  unsure (1)..(660): unsure at all n locations
catcaatattcgatctatctcctagacgccgtagagaattgagaattttcatgtctttgaattctggtactcgtaattggaaagttacggaaggagatccatcattttgcaatgaaaacaacataaaaaactctggacaatttcgaaatcagaccaagcgtcttaatacatatgcaaaaaaattcattattggcacaccattgattacaagagttagcttttatgaatcgctattggtttgatacgaataatggcagtcgtttcagtatgttaaggatacagatgtatccacaattcatttagagttacttaatagcctatttcttatactatatctctatcccgtgaaattctcgagcccaaagatggatgcatatgctgtgtttcattttgctaaatgatatcaattaaatggtatatcaattctataaattggatatagcaataaataaatcagcaaaattcttttattttagatagaagaaatgtttcttctatctaaaataaaagaatgtacccttctatccaaatccaatttgcatcgataaaataaatccaaattccagattccagcaataaatgaataattgcaaatttttgtgtgtacgagattagaataacttaaaaataactgacataattttttattnttcctgatca

SEQ ID NO: 462488 - DNA, 641 bp, Sorghum bicolor
  unsure (1)..(641): unsure at all n locations
tcatcacctttatctttgatttgtgaaatccttgggtttagacattacttcgggaactcctattcttttttctttcaaaagagtagcaacataccctttcttttttcttatttccttcgataaagcatttcactcttctatagaaatcaaatatgaacaattgattcagatagacttttaatcaaaaaagtttttccaatcttccaaaattggactttttcttattttaaccttttgatttccatattaaggatagactgacaaagttggcctaatttattagttttcactaaccctagattctttcccttgatcaaaaagaaattctgtcctctcgagctccatcgtgtactatttactttacttacaaacaacccagcgcaaattcggttcgggacgaatagaacagactatgtcgagccaagagcattttcattactatggaaaatgatggatagcaaaatccacaatcgatcatgtccttcaagtcgcacgttgctttctaccacatcgttttaaacgaagtnttaccataacattcctctaatttcattgcaaaatggtatcgagaattgatccaatatggatgggatcatgaatagtcattgcttttgtataccaattcaaacctgctatctatg

SEQ ID NO: 462489 - DNA, 638 bp, Sorghum bicolor
  unsure (1)..(638): unsure at all n locations
atcacaacacattcttgttaccacgagatgtattggccgctacggatcatttgatgggggggtggagttggaacgggtatanncttgacgatgacgatanntgaatcacttgaaaaataaacgtattcgttcggttgcagatctgttacaagatcaattcggactggctcttggccgtttacaacatgcggttcaaaattctatccgtagagggggggggcgtcaatcgaaaccgactccacaaactttggtaactccaacttcaacttcgattttattaatcactacttatgagaccttttttggcacataccccttagctcaagtttttgatcaaaccaatccattgacacaaacggttcatgggcgaaaagtgagttgtttgggtcctggaggattgacggggagaactgcaagttttcgtagccgagatattcatccgagtcactatgggcgtatttgtccaattgacacgtccgaaggaatcaatgttggacttaccggatcgttagctattcatgcgagaatngatcactggtggggatctatagagagtccggtttatgaaatatctgagaaagcaaaagaaaaaaagagagacaggtagtttatttatcaccaaatagagatgaatatta

SEQ ID NO: 462490 - DNA, 593 bp, Sorghum bicolor
  unsure (1)..(593): unsure at all n locations
catcaattcttgacgtctctaattcaaaaccgaacatgaaattttgatttcattcggccctgtatngatattctcaccacttaacatctatgtcagcttttctgtctgaatggaaccaaagctctctgctttctagatgatccttatagagtaggagatagaaattctcctaaatatctatctaatctacttacttcgttccctaagggggggcaagagatcctgaggaaaagagttgggtttccaccgagctgaaacaatataatatactgatggttctagtaaaccaaaaccatcgttttttagctattgggcttccatttcctacaaaacaaaagaagatttagttacgattggaaataaacttttttgtatcttcatccatagatcctttactcatatttattcaatcggaatacttatcggaatacttaatccaatgcaaaattttgcttcgcgactacgtactcataatcgaatttgtattttagatgcaaattcaattagtctttggatactaatcgcgagaatgtatattcttcctcaatatgctattgagaggaaaaggattaaaccctttataagaactaaag

SEQ ID NO: 462491 - DNA, 677 bp, Sorghum bicolor
gtacagttgttcatcaggttggctagagatttcttggaaaaataccagcccccttcggtccataatgagatgggactaattctatttttattctatagatttttcgcttagtactaggtatagaagggagaagccatatgagagtatagaagggagaagccgtatgagatgaaaacctcatgtacggttttggaacggagattttttgaatagaatgaacgaccgtaacggatgttggctcaatccgaaggaaattatgcggaagctttgcagaattattatgaagctacgcgactagaaattgatccctatgatcgaagttatatactatataacataggccttatacacacaagcaatggagagcatacaaaggctttggaatattatttccgggcgctagaacgaaaccccttcttaccgcaagcttttaataatatggccgtgatctgtcattacgtgcgactatctccactatagaaagaagaaaaaaagaaaggaggaaattttctagtgaatactagaaaagagggctttctacatagggatcgtcaaaacaacgattttaccctatcagctgtaggaaggaaggacacttcacgagaatcaaaataggaagaaagtagagcctatactactattctatggataaagctgaaattgatagagaaaacacc

SEQ ID NO: 462492 - DNA, 313 bp, Sorghum bicolor
  unsure (1)..(313): unsure at all n locations
gacgnggaggaaaaancggacggggngggggggcaggagcaggnaaaacaggacggagcaggganagaancaagaacanngcnaaagcncanggaggcgnanccgnannnggcggagcaggggaacggacncgngaaggaaaggancnnnananggaaangaaggaanccggagnaannaaggaaaaaaaaanggaggaancaaagggagcncnaggcaanggccaaangaangaaccgccgggagcncgnangagagnnggnnaaaccgcccnaacaanggcagaanacnnccgagaggggaanaagcaaga

SEQ ID NO: 462493 - DNA, 646 bp, Sorghum bicolor
tcatcaccttttatgaggaaaaatgtctaatgatttagattctctcattactaatcctgtgtgtgactttagtgttcctaatccctcactaacttttgatggattgccttatggttataagtttaaattatagtaataactcaaaatattctagtaatggaattccatatcgcgaatcctttattcttgcccgcttcaagatatgatgactgggggaacaatctcaaccttggggtaaagagtttacactgcttatgtttactttaacttttttcttgtacgtaggaaatgagattttttatttttactacaaattaataagctgttttgtttcactcatatagctatcgagtttaacttaccaacgcgaatacagaataagcaaaggaagataagcattcaatgtattttagaggaaaaagatcctattttaacgaatcacacgtagagatattgctagtacacaaaaagttaatggtatttcataactaatagattgagcagccgctcgtagaccgcctgaaaaagaatatttattatttgagctatatcctgccatgagaagaccaataggagcaatacttgaaatcgcaatccataaaaaaacaccaatactaagatcagctaaaacaaacgatatcccaaa

SEQ ID NO: 462494 - DNA, 597 bp, Sorghum bicolor
catcacacaactccatttctgtccaaattgcggagtaaatgttcttctagatgtggtgtgtgtgtagtgattttttcagcggagccttggcttgtcgtatccgtctgaatttcatattttcggatgtgaaaagaagtataaatatcctcatataccaaacgttcactaattagtactgcgtcttcaaaattgtaaccctcccagggcatatgagctactaaaacgttttttcctaaagcaagttccccgccaactgtagctgctccctccgctaaaatttgcccttttttaatggatttaccccgcggaacccgaggtttttggtgcatacaagtatttttgttagagcgccgatgggcaactaaaggaatacttatggtcttcccactacttgataaaaggatcttgtgactatcactagaaatgatctttccctcgcgttcggctataacggaaaccctcgaatctagagctgtttgtcgttccaatccagttccaacaatgcacttctcggaccgagaaagtggaactgcttggcgctgcatattagaactcattaaagcccgattcgcatcattatgctcaataaaaggaatg

SEQ ID NO: 462495 - DNA, 676 bp, Sorghum bicolor
gtacagttgttcatcagttgttgtttcaaggttaatctatttattcgtctggataatatttttccttgttcactaataaatcgattaattaaactcatgtttctataatcaattcgatcccccgggcctattcgagaacgcctacgaaaaggttgtttggatttacgaaaaggttgtttgaatttacgaaaaggttgcttagatttatgaaaagtttgtttggatttacgaaagggttgcttagatttacgaaaaggttgtttagatatatacatgatttattccttattttaaaatttgaaaaaaaaaaagatttctttattttattaatttttgatccagaaccagaagaagtagtctttctttggtccatatattatttgattaatatactatataaaaatataaaaaatcaaaatatataaaaataaaaaccctctatacatatgaaataatatctacctaaaatgagattagttgatttgtattttgtattctatccatgttctatatatttaataagaagttcttactttttctgttctttggaaaaatcgaacacacgatgctcctatttctttatttcattatgagtggtatgctttcgacaataacgacaaaattttcttaattctaattgtccgggcgtattgtggcgattcttttgagtactata

SEQ ID NO: 462496 - DNA, 126 bp, Sorghum bicolor
  unsure (1)..(126): unsure at all n locations
ggaaanagaaaaaaagaaancctttttttatacatgggtgtgggtctncttcatatttctttntataaaaaaatacannaatttatacaannattnantcnnccctattcatacactatctaaaca

SEQ ID NO: 462497 - DNA, 630 bp, Sorghum bicolor
tcatcagacgttggttgattatttttgacgtctctaattcaaaaccgaacatgaaattgggagttgattcggctcctttatggatattctcaccacttaacatctatgtcagcttttctgtctgaatggaaccaaagctctctgctttctagatgatccttatagagtaggagatagaaattctcctaaatatctatctaatctacttacggggttccctaatttcattcaagagatcctgaggaaaagagttgggtttccaccgagctgaaacaatataatatactgatggttctagtaaaccaaaaccatcgttttttagctattgggcttccatttcctacaaaacaaaagaagatttagttacgattggaaataaacttttttgtatcttcatccatagatcctttactcatatttattcaatcggaatacttatcggaatacttaatccaatgcaaaattttgcttcgcgactacgtactcataatcgaatttgtattttagatgcaaattcaattagtctttggatactaatcgcgagaatgtatattcttcctcaatatgctattgagaggaaaaggattaaaccctttataagaactaaaggttttatcggaatatgaatat

SEQ ID NO: 462498 - DNA, 687 bp, Sorghum bicolor
gtacagttgttcatcaaaccccctaaagcgaaataagcacaaggaaagagcaataagccggaccatcctacaaaaacaaaacggtcccttcgtaaccagtcgtccataatatcaaatagatcgttttcttctttagtaactctaccaacggctatagtcatagtgatcctcctattcaattacttcaaccattttcgagcacctcatattacttccagggcatacgatagtttgattatctgtggacgatttctttctcgttcaatgccctttttcagtcgtctcgaagatagaaattttgcatttttatctatggggtcacaaccaaggtcgtgctaaatccacgaatttcatttaattcatttttcttatactatagaaaagaaataaaagaaaagaaataaagaaataaacatttgaattcagcattattccatgatttctatttcaaagcctattttttaagggaaaacccctcttttctcattcgctctctattgcatgggtggaagaacaaaaatagaataggattctgaaaaaaaaagaaagatattgaaaagaaaaattgacttttgaaaccctttattcattatgtgtaacggaaaagagttgcgatttctttttattcctatagaacgtctagtaacaagattatgaaatcgtaaatagcgaaaaattcttgccttg

SEQ ID NO: 462499 - DNA, 147 bp, Sorghum bicolor
  unsure (1)..(147): unsure at all n locations
agagaaagaaagagaggagnaagaanncncnaaacccannnggaagganaccancnnnanaacnanccangacngnnnnngncncnagcangaccacnngagaaaangnggaggaaagnaggggaaanggccganaccacnggaaga

SEQ ID NO: 462500 - DNA, 656 bp, Sorghum bicolor
  unsure (1)..(656): unsure at all n locations
catttcttgttattacaaccaaaaatttccacgggttcggaaccatttaatccataatcatgagcaaatgcataaatatattcctgaaagagaagtgggtagacgaagtagtgttgacgagatttctgtttttctgaatacccttcgaatttttccatttgtatttctacttgaatcagagaaaaaagcatttctcggtttatcaaatgatgatacatagtgcaatatggtcagaacaaggtgttgcataatacaaacccaggaaagaaagggagtctaatccatagaactttttccgctccttttctatctaattagtttatgtttgttctaattacaaaacaaacaagaactaatcttttatttttgcaggccaatcgctcttttgactttggaatacagtctctttatcaatatactgtttcttttacacattcaagtcataacatcccttttcaatccataatcaagaataattaggatttctaaaaaaaaagtaaagggtccactcataggaaaacctaacctttccctgcattaggcactaatctatttttaacgtctaattagatcggngaatccttccaattaaccaattaagaagttaagctcgttgcttttttttttattntaccagaattagagccaggctctat

SEQ ID NO: 462501 - DNA, 616 bp, Sorghum bicolor
ctaatcagatggtacagtagttcatcaacacattgctaacactagaaaacttcccgtttctttctattctattgagatgacaaagaagaaaaagtggatttccagtcgcaggctgcaaaattcagaacaaattagaaccattaactataatataattaatataatttttttttgaattgcagtagtgaacgactcttaaatcggtattcccccccccccccattattttgaatggcataataaaatagaataagaataaatgtttccctaatctgtatatagggaaactccaggtccgaacagcattattatctacagatcccccttatgtacatatccctatggggaatcgtgctttaatttttcattgcattaaatattttgaataaaaaaaagagggaatttgctctgatatagattatagcctggccttcttggcccacctaagtgcaattacgataaaagaaaggatatgtagataggtggataactagattggcaagtattttaaaaataaagtactttatctttattttaggattctacaacgaaatcctttattttctagcaattctactactacgaaacaaaaagacccttcaaattcttttgaaaa

SEQ ID NO: 462502 - DNA, 635 bp, Sorghum bicolor
  unsure (1)..(635): unsure at all n locations
gtacagtttttcatcatcctatattcgtcctctaggatcccatactcatcttctagggtttcatattcgtgctctagagtcctatattcgtcttctaggatttcatattcgccctctccctctcgggtcctatatttgttctctgggctctcatattcgtcttctgagtcttcctctcgagtcctatactcttcctctcgggtccgatattcttcctctaggggcctatatctaaatttaacaattcctgaaccccttttatcttttctgtatcgtggatcgtcaaaataagcaaaaatagtatttctacgtaaaacacccataaagggtatttccattgaaatacccaaacaggatattcgctctttttcttgttcttgatgatattgtaatggaacggcaaacctatttcttcgctttttcgccaacaaatccgaattatcttgaagaatagaaggatagaaacaattccaatgaccgttggacacgattcgatctggcgttaaataatcaagaatttccctatcttttttaccaaaagtatccaacagtctatggcttacttgatcattaaccattgagaagtcaaagatatatcttncatcaacagaaaaagaataagtattcatttgatc

SEQ ID NO: 462503 - DNA, 607 bp, Sorghum bicolor
  unsure (1)..(607): unsure at all n locations
catcacgcatagtttcccctccaaaataacctctcccgttggggaacgcattagatatttacctaaacccgtcggtccttgggcagaccctacattagctccaagacgctggtctctaactagaaaagtaaatgcttgagcttgagaagcttctggtccagtgggcccgtaaaactcacttggataagccgtattattgaaccagacagaacaacaagcgataaaaccaaaaacagataaagcacctaaactataagacaagtaagcttcgccagaccatacaaatgcacggcgagcccatgcaaagggtttggttaagatatgccaaattccgccaagtacacaaatggaacccaaccatacatgccccccaattatatcttctaaatcatccacactaacaatccatccttctcccccaaaaggggattttagtaaataaccaaatataacaccggggctaagggtcaaattggtaatttttcttacatccccccccccgggggcccaggtatcatatacgccgccaaaataaagagccttgagtactanaagaaaagcacctagacctaacaaaattaagtgaatacccaaaattgtagtcatt

SEQ ID NO: 462504 - DNA, 187 bp, Sorghum bicolor
acccattgctaactctgcatatatatatattgcgtgaagaatcccagctaacactgatgactaatctatccaacagagccgattgatgtagctggtgatccatacgacataattaaacgtgctactgaagctggacaaaaaacatgcaatgatcctgacgggatagcacaggttaaatattgccaat

SEQ ID NO: 462505 - DNA, 619 bp, Sorghum bicolor
  unsure (1)..(619): unsure at all n locations
cgcgaaaacgaaaaagaacgggggtannnaaaaccaanncaaggngaaaaagggggnngcnccnncggcaaaaccagganaaagnngagccaaaaggncgcganncaagaaaaanncangaggaagnggnancncnnaaggaacaaccccagcttttttaatggggagggggtaaagatacatgtttttggtgtcccacccaaaaaagagacccaagtcctaataaccccgctaagtggtgattcaacatggattctacatcttggaaccaggccaatttgggagcggctttgtgataatggaaccaaccggcaaaaagcattaacgatgcaaaaatcaatgcaccaattgcggtacaatagagttgnaattcactagttattccggatgctccccaaatctgaaaaaaaccaaagttatttggaattctcggaaacccccgcctacatcaccatttaaaaatttcttgtcctactattggcccaaacaactgagcactgggtccaatgtgagtaggaacgcttaaccattcttcataattggaaaaacgggcacccngtaagacatgccactcaaccaaagaaagataatggagagttggcccaaaatgacactaaag

SEQ ID NO: 462506 - DNA, 331 bp, Sorghum bicolor
  unsure (1)..(331): unsure at all n locations
ttaccaaagaacttctttctctattgttcacgcgtttagatccgggattaaactatannanntcnaatctccccttnttcctcantaactcantgntanancnnncnnctnttaactnactgntcntannttcnaatcctacttnnnnagatttnattcattctttaatttttttttaaanaattgagtggaaanacttncttttacccttnaaaaaaaaaaaccccttcnctatccttntttctattncattctatctcatcntatcacattctttntctacnattccacttcnacaaaannaaaaaacatacccaanttcaataccttt

SEQ ID NO: 462507 - DNA, 638 bp, Sorghum bicolor
gtacagttgttcatcatgctggattggccgtagggcttgcttctattgggcccggagttggtcaaggtactgctgcaggacaagctgtagaaggtattgcgagacagccagaagcagaaggtaaaataagaggtactttattgcttagtctagcttttatggaagctttaacaatttatggactggttgtggcactagcgcttttatttgcgaacccttttgtttaatcctaaaaaagaaaatgagtcctttagattagatacttttttctttttttagtacattggtatttgcttatgtaattctaagtatatcaatactttactcctatttataatattatttattttttatattattccggaaattttgtatttatcgggacagacaataccctaggaaccccaagaagggctgatttgagcatgatcaatttagaggatatgctcgccctcttccttcccgtccttagtttaggacagtggaaagtatttttccttttattttaggaattttgggaacatttcaacaaaggagatctttcacaggtcaaacgagacctaagatttaatctaaaagaaattattagattgaatccatttgcattaaaaaaattggattaaaaaaaccgatcaaaa

SEQ ID NO: 462508 - DNA, 632 bp, Sorghum bicolor
  unsure (1)..(632): unsure at all n locations
gtacatatgtcatacaaaagtgtattttgagtataccgaattagtatagctatccttcctatggcacagcaatccagttttgcttggtcccgaaacagaattccttttttctcttttttgtttcttgtctataggaaaattacatgttattcaaggcatcaatagaaccccacaatttttttggtcctacttattttcattgtcttcggaatagtagaataattaaatttggaatagcggccaagatcttgggaaaacctaagttaatgattaataagataaagaatttaggaaggatattctcatattgacgcaatacaaagataagtatatgcaaaatctatccctttttagttaaaggaatttaattggttagcataaaataatatctaataaatagaaaatcgaatagtggataatccgttatgaaagaaacggaatacattctttgaagaatcaagattcgtaatcaatccttgtcttgtttgttggattaggtctaactttcttgaccaaacagcaagcatggaactttacangaagaacttaaaagaaaaggataattgaagtaacttcgaatcaacttttgttggggttcaaaaaaccaataaaataaaaaaaaaagtaaattc

SEQ ID NO: 462509 - DNA, 355 bp, Sorghum bicolor
tcatcataatgatagtcagagactattaaataaaaaagaaaatacttactactaattagattagaacataatggaaatcgggatgattaatatatacatcctaatgaggagtgatactaaaaaaaagaactctatttcagaattatgaaacagaatatcctgctttattatttactctttctttttttcttttgattttttctattttatgtagagtggagcgatctatatcatgtacatttagataatgtttatgatagtaatatacttccaaccaaataggagttggcaaaatggataaactcgctgcagtccttttctgtaagtatagggtgacttagagcatatcctattt

SEQ ID NO: 462510 - DNA, 632 bp, Sorghum bicolor
gtacagttgttcatcaggttggtaagtaatactactcctagacctcctagtagaagaacaaatcccccaaatagcacaagaatctcatgtattggtccaggtaaatccattatggataagaagaaatttctagtataaaatttttcatgaactgactaaaactaaaagattcaaggaaggaaaaaggtattaggatatttttttgtatatgcatataagttgttaagcagtagttatttttttttccttagagttagtaaaaatggatttttctaataaaaaaatcctaatacctagtaatccgtaatcgttcttgaattccaagatttttcttcgtctattttactttgaggcgaattcctaattgtttgaattgtgtaatctcccattatggagattggtaaccgactcaaagcaatttgattgtaattcaattcatgacgatcataagtagaaagttcatattcttcagtcattgataaacaatttgtgggacagtattcaacacagttaccacaaaatatacaaactccgaaatcaatactataattaagcaattgttttcttttaatatccttttcaaatttccaatccacaaggggtagatctatcgggcatacgcgaacacatac

SEQ ID NO: 462511 - DNA, 451 bp, Sorghum bicolor
  unsure (1)..(451): unsure at all n locations
aaaacaaagnaaacataagcagngnaaaccctnnaccccaaggnngagaaagggggaggaggggcanaacnngaagcgggcaagaanaaaggagncgcgananggaannccannacnnagaaannnngagnnannacccaaannnaaacnnanaaccanaaggcaanccancaaaagnnagngagggannaggaacacnaaagggcgggggggannagnaangagagaancnaaancannanacannnnnccncanaaaaggaancanaanaaggacccgaaannggnggaaaagaacaagcagnacccccnncaaaaaccggncnagagnangnncccanncacnnngaaaggaaanggcnancaagaacgaannaacccnnnanncnnnnnnnnaagnanaccccncccggggaaagaagaanaggacanaagacacggaanacaanac

SEQ ID NO: 462512 - DNA, 612 bp, Sorghum bicolor
  unsure (1)..(612): unsure at all n locations
cataagggagatcggctgctacccctcctatgcgaaagtaattatgcgtgatggcatacctataacancttcaaatagatcatatatcaattctctctctctaaaaatgtanaaaaaaggagtctgtgccccgagatccgccataaaaggtccaagccataacaaatgagaagctatacggctcatttctaacatagtgactctaatatagctggctctttggggtatttgaatattctctaagaattctggtgcatttaccgttattgcttctgtaaacatagtagctaaataatcccatcgtgttacataaggcaagtattgtataatacttctgttttccgcaattttttccattcctctgtgtaaataccctaatatgggttcgcaatcaataacatcttcaccatcgagagtaacaatcagtcgaagaacaccatgcattgatgggtgttgaggacccatattgactatcatgagatcttttcttttaagcgatagactcatatccttgntcttattctttattccatgaaaatggattattccatgaattcctcaaaaccaagctcatcaaaatgcaaaatctaagactaccttaagactactaat

SEQ ID NO: 462513 - DNA, 447 bp, Sorghum bicolor
  unsure (1)..(447): unsure at all n locations
ggtgagtcttgcagncaatctcccttctgcctttgcgggggaggggcgatgtacaaaaaacccnannaaacctttgcacccctccnttaccttttnnaaggcctacgccccatagaaactgtctacctgagactgtcccttggcccgcgggtctgacacaaggttagaatcctatttcttccagagtggggggtgactnatnnctctttcccccccaaaaaaaaaccttcttcnccttccacctaanctncncannaaaancccaaanccaatcccannnaacantaaancttcatannntctttctttccaaatccanntantccncatcttcacaaacatntctatttcaccnaccctctctccnaaacantncccaaatcnttacccctttcntcccnntcnnaacttaccccaaaaaaaatttcnctaccttannaccnttat

SEQ ID NO: 462514 - DNA, 570 bp, Sorghum bicolor
gtacagtatttcatcatttttttctcttcactcggaccaatccacctagtcgacttcttgtattttttgtgagttgtgtatcgactccaataatactattgtcaagtacctttagggatgaggatctcggcaagatatgcagttcttgaagaatgaaaaaaaaccgatctacttctttttggtattttagactaaattcttttgttcctcgatgctcaataaaaccctctttttttaagatagaatcttcctccgggctcccatattcgtcttctgagtcttcctctgagtcttcctctgagtcttcttctaaagtcccatattccttctctgagccatcttcagagctcccatattcttcttctgagtcttcctctaggatttcatattcgccctctccctctcgggtcctatatttgttctctaggctcccatattcttcctctgagtctttctctagagtcctatattcgtcctctaggatcccatactcatcttctagggtttcatattcgtcctctagagtcctatattcctcttctaggatttcatattcgccctctccctctc

SEQ ID NO: 462515 - DNA, 643 bp, Sorghum bicolor
ttttctttgaaaccaggattccttgtataatttaatccatcttttagttttttttgaatcattgaattcattattcgacgtagtctagcaactcatctttatttgagacaccccgctcgcttattgcaattcagaattgaattgattttatcgttgatatatttgcaattcaatcggaatgaatatatccaaaagtttttctctctcccgcctccctccttccttttttagagtattccaaatcatactataacgcttgatattcattctttttttctaagctgaattagaaatttcatttgctatgattctatcttctccttagtgaactatttatccttaaattattaacaaataaaaaaaacaaaatatctcaaaaatgtatataatgatcaaatgaaaatgccaatctcttggcattttctctttattatattatgcatatatattcttcttttctatgtattagattattcgtccgagccatatcaaattgaaaatatctgaaatcaaattcaatatagaatttggaatagattctattagaaaaatccatttgcgaattagagaaataaaaagaaagttcaataaattctataatcctatttaagaatatcattttagttaagcatatcaagctaac

SEQ ID NO: 462516 - DNA, 669 bp, Sorghum bicolor
  unsure (1)..(669): unsure at all n locations
cattttgggattccatttcttaataccatgaccaaaatgaactcccgcttctatcatctctttcaaattgatgttccaatatcttcttgtcattttttccacacttcctttttattttttcttttttcgtcttaccattacggaattaatttctttttgaagattaagaaagagccgaaatagcttgaaataaataataattgttccgatggaaccttctactcataattgaccattgatacacggtataaacatagccttaatgaattaactgacttcttttacttattcaaatacaattcaaatacaattcaaattcaaatacaaaatcgaaaatcagacctgttagcattctaaggtcaaaagtatagtttaaatttaagtaaaaaaaaattgctttatgtatacttaaatcgtataaataggggtaaacggggtctctgatgtttcatagaaattgtttgttacgtcagaatcagaagaaactaattctgtatggagaaacaaaatatctctcatttccgacgcgaatagatttttttttttaatttcgaaataaaggttcttgtcttgtggggaacgatgcacaaatttttggaatccggtaccaacaggtataatccnncccagaactacgttttctttcaggcctttcaaccaatcaatacg

SEQ ID NO: 462517 - DNA, 140 bp, Sorghum bicolor
cagtttgttcatcacaactatgaatcgcatgatgaagtaccacatgagtggatatatagaaaaggcatccaaatccgccgaatcagttcatgttatgatcttgtacatcctaggtctacgagtaccgttaactggctcat

SEQ ID NO: 462518 - DNA, 675 bp, Sorghum bicolor
tcatcaaacgtataggaggttttctcctcatacggctcgagaaaatgattcgaatttctgtctataatgcaaatagatagaaattcgattatgacttgcattaatttccttaaagaaaataaaaaacaaatttcatttatactcatgactcaagttggctaattttgactgacaaacttcaaaagaaaaacccttcgaaattttttgagtcgtctctaaactcttttctttatctcatctcgaacaaattgacttttattccttattctgatctaattctattgttgagacggttgaaaatcgtgtttacttgttccggaatcctttatctttgatttgtgaaatccttgggtttagacattacttcgggaactcctattcttttttctttcaaaagagtagcaacataccctttcttttttcttatttccttcgataaagcatttcactcttctatagaaatcaaatatgaacaattgattcagatagacttttaatcaaaaaagtttttccaatcttccaaaattggactttttcttattttaaccttttgatttccatattaaggatagactgacaaagttggcctaatttattagttttcactaaccctagattctttcccttgatcaaaaagaaattctgtcctctcgagctccatcgtgtactatttac

SEQ ID NO: 462519 - DNA, 550 bp, Sorghum bicolor
  unsure (1)..(550): unsure at all n locations
aaataccctaatatgggttcgcaatcaatatcatcttcaccatcgagagtggcagggggtncgaagaacaccatgcattgatgggtgttgaggacccatattgactatcatgagatcttttcttttaagcgatagactcatatccttgttcttattctttattccatgaaaatggattattccatgaattcctcaaaaggggggtcatcaaaatgcaaaatctaagactactataagactactaataaaataggaaaaaaattcgaacgattaaattacttctcccgaatatccaactgactgattaatttcttataacgtactctatttttctttgccaaataagccagcaaacgttgacgttttcccaaaagtcttcgtagacctctttccgatgaaaaatcttttttgtgtaattctaaatgtgaagcaagtctccgtatcttattggtgaaactgaatacttgaaattcaacagaacccctgttttcttgtttttcttctttaaccataaatcaacaaaattntctaccttctttctttttcatgt

SEQ ID NO: 462520 - DNA, 602 bp, Sorghum bicolor
catcagtatatattgtaggaataattaaacgattccagacaacagtctggcacatttacgggctgagaaataatgatccttgtagtcataaccgtagaatagatcctaatcgaaatgcatacatttggttcatacgctattggtatggtaagaagagatgtattttacagactagagaggggctatctaaatcctaaagtaaagacccgcgggggaagtaccaatcgcccaccgccatgaactttctcctttgattcgataaggtggaattagcctccttctcgaatggctacccttgacaaagggtagcattggtatcataatctacatgtagcgggtatagtttagtggtaaaagtgtgattcgttctattaataactgaatttgaaatgatatacttaaggcatccttaagtttttttatattcatattccgatgaaaactttagttcttataaagggtttaatccttttcctctcaatagcatattgaggaagaatatacattctcgcgattagtatccaaagactaattgaatttgcatctaaaatacaaattttattatgagtacgtaatcgcgaagcaaaattctgcattggata

SEQ ID NO: 462521 - DNA, 650 bp, Sorghum bicolor
  unsure (1)..(650): unsure at all n locations
tcatcatgagatgactttcacaaatttatcatagacttcgtctatcgcttgagagaagcaacaaagagtaataacttaaaaagaaaaacagatacgaatcgacagatttacctgatgaaaattgacatcagaggactctgatgaggattcctcaaactcttcataaagaggatccagaaagtctctggttagtcgagaccctccatttcctaatttcctctcttcttttccgctcaattctagtttattagattcttgtttaaaagaatcaaagaagatgaatagaactaagaacacataaaaaagagcatagagaaccattaccaaacgttcctcctaagaatcatattgggtatctgtccccttccttttaaccctaggatcaaaatctagaatcctcccttttcctagtgttcggaaacggaaaaccctgaacctggaggagttaggtatgtaggatatgctttttattttttgttgggcaggcagtagtataatttttatactctgcagtataaattcgactcccaacttttttttagaataaaattgttgataaaactccaacatagtttgttccaaatccactanaatccttgtagaatagtcaagtaccccatttccaaggggtacctgttgaaaatcgtttc

SEQ ID NO: 462522 - DNA, 649 bp, Sorghum bicolor
tcatcagtactcgtaattggaaagttacggaaggagatccatcattttgcaatgaaagcgcatgagaggaactctggacaatttcgaaatcagaccaagcgtcttaatacatatgcaaaaaaattcattattggcacaccattgattacaagatttagcttttatgaatcgctattggtttgatacgaataatggcagtcgtttcagtatgtgggggatacagatgtatccacaattcatttagagttacttaatagcctatttcttatactatatctctatcccgtgaaattctcgagcccaaagatggatgcatatgctgtgtttcattttgctaaatgatatcaattaaatggtatatcaattctataaattggatatagcaataaataaatcagcaaaattcttttattttagatagaagaaatgtttcttctatctaaaataaaagaatgtacccttctatccaaatccaatttgcatcgataaaataaatccaaattccagattccagcagtagatgaataattgcaaatttttgtgtgtacgagattagaataacttaaaaataactgacataattttttatttttcctgatcagaaaaatacatgaaaaagaaaggaggtagaaaaatttggtgatttatg

SEQ ID NO: 462523 - DNA, 678 bp, Sorghum bicolor
  unsure (1)..(678): unsure at all n locations
atcaatacttcgtgacatgacgaaaattttccctttttgaattcttttttagtatatttaagaaaaagaaagaaaagatggataaggattgtattctttaattatttctctatgttttattacttaatttacgatttacgaatttccaattttttttattctattggattggatttgttcgagaattcgaagaattacaacaaaatcggtggggatcacatttttagttaggaacttctatggattttatccttcttcttttcttgggatccaaaataaaagaataaaagaataggtataagaattaagttaagtcgatccaaaaaggaaaggaggttcatggccaagggcaaagatgttagaatccgagttattttggaatgtattagttgtgttcgaaagggtaccaataaggaatcgacggggatttctagatatagtactcaaaagaatcgccacaatacgcccggacaattagaattaagaaaattttgtcgttattgtcgaaagcataccactcataatgaaataaagaaataggagcatcgtgtgttcgatttttccaaagaacagaaaaagtaagaacttcttattaaatatatagaacatggatagaatacaaaatacaaatcaactaatctcattntaggtagatattatttcatatgtatagaggga

SEQ ID NO: 462524 - DNA, 603 bp, Sorghum bicolor
gtacagtagttcatcaaaccccctaaagcgaaataagcacaaggaaagagcaataagccggaccatcctacaaaaacaaaacggtcccttcgtaaccagtcgtccataatatcaaatagatcgttttcttctttagtaactctaccaacggctatagtcatagtgatcctcctattcaattacttcaaccattttcgagcacctcatattacttccagggcatacgatagtttgattatctgtggacgatttctttctcgttcaatgccctttttcagtcgtctcgaagatagaaattttgcatttttatctatggggtcacaaccaaggtcgtgctaaatccacgaatttcatttaattcatttttcttatactatagaaaagaaataaaagaaaagaaataaagaaataaacatttgaattcagcattattccatgatttctatttcaaagcctattttttaagggaaaacccctcttttctcattcgctctctattgcatgggtggaagaacaaaaatagaataggattctgaaaaaaaaagaaagatattgaaaagaaaaattgacttttgaaaccctttattcattatgtgtaacgga

SEQ ID NO: 462525 - DNA, 624 bp, Sorghum bicolor
aaaacactcaaggggttatatgatatatcgggtgtagaagtaggccaacacttctattggcaaatagggggtttccaaattcatgcccaagtactcatcacttcttggctttttctgttgatggaagaatatctttgacttctcaatggctaatgatcaagtaagccatagactgttggatacttttggtaaaaaagatagggaaattcttgattatttaacgccagatcgaatcgtgtccaacggtcattggaattgtttctatccttctattcttcaagataattcggatttgttggcgaaaaagcgaagaaataggtttgccgttccattacaatatcatcaagaacaagaaaaagagcgaatatcctgtttgggtatttcaatggaaataccctttatgggtgttttacgtagaaatactatttttgcttattttgacgatccacgatacagaaaagataaaaggggttcaggaattgttaaatttagatataggaccctagaggaagaatatcggacccgagaggaagagtataggactcgagaggaagactcagaagacgaatatgagagcccagagaaccaatataggacccgagagggagagggcgaatatgaaat

SEQ ID NO: 462526 - DNA, 664 bp, Sorghum bicolor
  unsure (1)..(664): unsure at all n locations
gtacagttgttcnatcagttgagaaatagaaccatctgatttgattcgttcccaatagccatgagatgatcatcttagggtgatccttttgtcaacggatgctcctattacactcgtagtctctgaaggatgagaacccactatgtagcatttacatcgataattcaagcattgtatacgtcattagtccgattctttgtaggaactacccgtaataacgagcttgcaaaatggatctgtttatcataaagagattcgttgttcctgaccctgcttcaccttaattgttatttgaacaaaaagatcacaataaacttttggtaaaagttctgtcttggtcggagtggggatagcatttctcttctgcatgtctatggagttttgcaaaacccaaacacctcagatagaggtaggaatttgtcgaacgaaccacactccttcgtagacgtcaggctcgaatctagagctgtttgtcgttccaatccagttccaacaatgcacttctcggaccgagaaagtggaactgcttggcgctgcatattagaactcattaaagcccgattcgcatcattatgctcaataaaaggaatgagagaacctccaatagaaaaatattggaaaggaaaaatacttctaacatgaatctgttcccatgcaatagtca

SEQ ID NO: 462527 - DNA, 669 bp, Sorghum bicolor
gtacagttgttcatcagttagtaaaaattcaaaactcagattgctcttttctattttccatatgggttgcccgggactcgaacccggaactagtcggatggagtagataattcttccttgttacaatagaaaaaacccctccccaaatcgtgcttgcatttttcattgcacacgactttccctatgtagaaatagccgatttctattccgaagaggaaggccactaatttttagaatttttaattagttaaagtgattcacctactatggaacatttcagaatggaaaatgtgcaagttttatcttgatatcgatcttttctagtttattaattttgtctaatgattaattaagagtaagaggattcaccaggtcattgatacggataatatccaaataccaaatacgctcactttgtgatccatggaaagaaaagtgaattgttttggttttggtgaacatcaaagaaaaaacttgctcttcttccgtaaaaaattcttctaaaaataccaaacccaatcgttgcataaaagttcgtaccgtacttttatgtttacgagctaaagttctagcacattgaaagtcgaagtatatattttagtcgatacaaagtctgttttttcgaaagatccactatgataatgaaaaagatttctacatatccgacca

SEQ ID NO: 462528 - DNA, 645 bp, Sorghum bicolor
catcattctctatactatatctctatcccgtgaaattctcgagcccaaagatggatgcgtgtgctgtgtttcattttgctaaatgatatcaattaaatggtatatcaattctataaattggatatagcaataaataaatcagcaaaattcttttattttagatagaagaaatgtttcttctatctaaaataaaagaatgtacccttctatgcggggccaatttgcatcgataaaataaatccaaattccagattccagcagtagatgaataattgcaaatttttgtgtgtacgagattagaataacttaaaaataactgacataattttttatttttcctgatcagaaaaatacatgaaaaagaaaggaggtagaaaaatttgttgatttatggttaaagaagaaaaacaagaaaacaggggttctgttgaatttcaagtattcagtttcaccaataagatacggagacttgcttcacatttagaattacacaaaaaagatttttcatcggaaagaggtctacgaagacttttgggaaaacctcaacgtttgctggcttatttggcaaaaaaaatagagtacggtataagaaattaatcagtcagttggatattcgggagaagaatttaatcgtccgaatttttt

SEQ ID NO: 462529 - DNA, 620 bp, Sorghum bicolor
taattttagtaattagtaaaaaaatgtggtatgaatacttgctcttttctcgattttagatcggattttttggcggcatggccaagtggtaaggcaggggactgcaaatcctttacccccagttcaaatctgggtgccgcctgatcaataaaatacttaggattatagtactgatcaaactcgacaaattcgtacccccctaagttggggcacgagagtaactaggtttggcgatactggattttgagaatccataccatagttctaccctcaaactagggtttgttttgtgggcagtggcccaaacggttaccaatagggatgaggtagcgtttccttattcttttattaatttaaatcgattcgattcgggaatttaaaactacgagactaagatgtcagaaatcttcgtagccaaaggtccctaaggggcagtcttttttcaatctaagattgaagaagggactttgcgaagaaatagaaagacttcctaattatcatacattttatttatcgtacatcttactacatacacttagtatatcttatgctacctacatacactaaagtaaaggctactgattctgtcgagaattagattgaataggctgatcaaaaat

SEQ ID NO: 462530 - DNA, 609 bp, Sorghum bicolor
gtacagtagttcatcattcctacaaaacaaaagaagatttagttacgattggaaataaacttttttgtatcttcatccatagatcctttactcatatttattcaatcggaatacttatcggaatacttaatccaatgcaaaattttgcttcgcgactacgtactcataatcgaatttgtattttagatgcaaattcaattagtctttggatactaatcgcgagaatgtatattcttcctcaatatgctattgagaggaaaaggattaaaccctttataagaactaaagttttcatcggaatatgaatataaaaaaacttaaggatgccttaagtatatcatttcaaattcagttattaatagaacgaatcacacttttaccactaaactatacccgctacatgtagattatgataccaatgctaccctttgtcaagggtagccattcgagaaggaggctaattccaccttatcgaatcaaaggagaaagttcatggcggtgggcgattggtacttcaatcgcgggtctttactttaggatttagatagcccctctctagtctgtaaaatacatctcttcttaccataccaatagcgtatgaaccaaatg

SEQ ID NO: 462531 - DNA, 540 bp, Sorghum bicolor
catcaagttggtaagtaatactactcctagacctcctagtagaagaacaaatcccccaaatagctacaagaatctcatgtatatggtccaggtaaatccattatggataagaagaaatttctagtataaaatttttcatgaactgactaaaactaaaagattcaaggaaggaaaaaggtgttaggatattgtttggtatatgcatataagttgttaagcagtagttatttttttttccttagagttagtaaaaatggatttttctaataaaaaaatcctaatacctagtaatgcgtaatcgttcttgaattccaagattcctcttcgtctattttactttgaggcgaattcctaattgtttgaattgtgtaatctcccattatggagattggtaaccgactcaaagcaatttgattgcaattcaattcatgacgatcataagtagaaagttcatattcttcagtcattgataaacaatttgtgggacagtattcaacacaggtaccacaaaatatacaaactccgaaatcaatactataa

SEQ ID NO: 462532 - DNA, 587 bp, Sorghum bicolor
  unsure (1)..(587): unsure at all n locations
gtacagtttttcatcaaactacaccaaacgatctttcgaattggtcaagactctcaagtttatggccccttctatatggtaccagttgttgtttcattgaatttgcctcattaataggctcgcgattcgactttgatcgttatggattggtaccaagatcaagtcctagacaagcggacctaattttaacagctggtacggtaacaatgaaaatggctccatctttagtgcgattatatgagcaaatgcctgaaccgaaatacgtcattgctatgggagcctgtactattacagggggcatgttcagtacagattcctatagtactgttcgaggagttgataagttaattcctgtggacgtctacctgccgggttgcccgcctaaaccagaggctgttatagatgccctaacaaaacttcgtaagaagatagcgcgagaaataattgaggatcgaactctatgtcaaagtcaaaagaaaaatagatcttttactacccgtcacaaactttatgttcggcgcantactcacactggaacttacgaacaagaattgctctatcaatcaccatctactttagatatatct

SEQ ID NO: 462533 - DNA, 603 bp, Sorghum bicolor
gtacagttttcatcaatcaattgtatatcttgatttgattcctattggatttggattagttcgatttcaataggggttcttcagagtaaaaaaaaggatggaataaaagagtgattggttgaaaagaaagagaaatagaataatgagaatcatatggatttacacaaacctctaatgattagaaactaaaaacgagatctcgaagtaattcgaacgatttcgattatcatttatttgtacttattagttacttctacccgatagagcttagaagttggaagtaataatttcttggttgattgtatccttaaccatttcttttttttttgacacgaggaactcaccatgaatccactaattgctgctgcttccgttattgctgctggattggccgtagggcttgcttctattgggcccggagttggtcaaggtactgctgcaggacaagctgtagaaggtattgcgagacagccagaagcagaaggtaaaataagaggtactttattgcttagtctagcttttatggaagctttaacaatttatggactggttgtggcactagcgcttttatttgcgaacccttttgtttaatcctaaaaaaga

SEQ ID NO: 462534 - DNA, 642 bp, Sorghum bicolor
ttcatcatctaaatcgagtgggtttccatgaagaagatcttgttcagcatgttctattcgatactggtaggagaagaacccgactcggtattcttaaaaaaagaggggaagcagaaccaagtcaagatgatatggatcgccccttcttcttgcgccaaagatcttaccatttctgaaggaactggggctacatttcttttcaatttccattcaggagtttctatctgtttccacgccctttttttgagacctcgaaacatgaaatggacaaattccttctcttaggaacacatacaagaaaaaggataatggtagccctcccattaactaatttaagaatttcatagtaatagaaatccatgtcctaccgagacagaatttcgaacttgctatcctcttgcctaataggcaaagattgacctctgtagaaagactgattcattcggatcgatatgaggacccaactccgttgcattgccagaatccatgttccatatttgaagcgggttgacctctgtgcttctctcatggtacaatcctcttcctgctgagccccctttctcctcggtccacagagaaaaaatgtaggactggtgccgacaagtcattacggaagaaagaactcacagagccgggatcgct

SEQ ID NO: 462535 - DNA, 570 bp, Sorghum bicolor
caataaaaagacagttggcggtctctttgtatgtcttgccggggaaggaggacttaatgattattcgtcgtcggaaccagaagttaaaattgctgtggatagggatcctgtaaaaacatcttttgaggaatgggccagacccgggcatttctcaagaacaatagctaagggtcccgactctaccacttggggggggaacctacatgctgatgctcacgatttcgatagtcataccggtgatttggaggagatctcccgaaaagtctttagtgctcatttcggccaactctccattatctttctttggttgagtggcatgtacttccacggtgcccgtttttccaattatgaagcatggctaagcgatcctactcacattggacccagtgctcaggtagtttggccaatagtaggacaagaaattttgaatggtgatgtaggcgggggtttccgaggaatccaaataacctctggtttttttcagatttggcgagcatcccgaataactagtgaattacaactctattggaccgcaattggtgcatttgattttgcatacataatgctttt

SEQ ID NO: 462536 - DNA, 568 bp, Sorghum bicolor
catcatcctcgattgtagccaatattttattgcaaataattccgacaacctccggggaaaaaggggcgtttacttattatagagatggtgcgatttgactcttttttttattttagccctacctatatctcattcttacgagaaagagagagggttcgcatagagagaacaaaattagtaaaggaaacccgcgcttggggaaggtgaggtagacggacaattccttctgtcgtgtatcctcaattgatgtggcctcagatgcttcaattgtagatttgagtattgagcgaaaggttacacctacaggataggttctgtattacaggccaatccgactctactagtaccaataggcagcataggggagaaaagcactacaccacgaaataggaatcaacaagagaaaaactttgttagaaattagccctttcctgattggtatcagggttgggaagaatggttgggataacaaacaaccatcaggtttgtactttggatacccttataaccatcaaaggtcgttgaagtggctaattcctctaaataggaggcgttgagaacaaagaaa

SEQ ID NO: 462537 - DNA, 673 bp, Sorghum bicolor
  unsure (1)..(673): unsure at all n locations
tcatcaaatcggaacttaagttccgattgttgtttcttaaattctggttggagtttcttaaggttcnagttggaattgaacttttgtgttaattgaggaatatgtctattttttctgtgtctaggaccagtaattattgaaattgcctgggcttgaaattgcttctcattctcatagttacgaaatggtaagaaagataaaatacgagcctggggtatagcaacagtaattaatcgttgttgtttcaaggttaatctatttattcgtctggataatatttttccttgttcactaataaatcgattaattaaactcatgtttctataatcaattcgatcccccgggcctattcgagaacgcctacgaaaaggttgtttggatttacgaaaaggttgtttgaatttacgaaaaggttgcttagatttatgaaaagtttgtttggatttacgaaagggttgcttagatttacgaaaaggttgtttagatatatacatgatttattccttattttaaaatttgaaaaaaaaaaagatttctttattttattaatttttgatccagaaccagaagaagtagtctttcttttggccatatattatttgattaatatactatataaaaatataaaaaatcaaaatatataaaaataaaaaccctctatacatatgaaata

SEQ ID NO: 462538 - DNA, 490 bp, Sorghum bicolor
  unsure (1)..(490): unsure at all n locations
tccattgaagagaagcaaatgaaacgctttcataaaaattctcgtagaatcgagaatgaagttttcattctgtacatgccagatcatgaattagtaactgcagccaatctccgaaaagtcccgattgtttcgatttttggaatgggatatttacggaatccccatgaataggatcaaaccttattccatgctatttccataagatgcgctctttcttattcttaagcaagcccccgagagggcttagttgatcatgatttctgttttctctttttttttttcctttttatttgtttcgaaaaagatatcgtccgattctccttctattgattcttttccgatcgagatgtatggatccatgtgtctacatacctagattctgttcatggattaacgaaaatgtgcaagagctctattngcctctgccattctatgagtcgcttcctttttgcgtatggcacccctattccctttggcagcatctactaat

SEQ ID NO: 462539 - DNA, 657 bp, Sorghum bicolor
ttttaattttgcgagcgcgttcttctcatcttctgttgccttagtcactttccctgcgctatttgcagcagtttccccagcctgcgtcattttgactaatgaggaggtcagattgtcagcattatttttcgctccagtgctatcaataattattgcgagacgcgaggtttgctctgccatttattaaaactcctgacaacaaaaaacccaccgcgaagtgggtttcaggcgacataatagtagatatagcgattacgaggccacgcaatgcttttctccaggagcatcatcgatttaattaaagacaccatcacatctctgtaacagagtgtacgtaattaacaactacacacactgctcctgaaaatactggtcatccagtgcaaagatcactgcttcaaattcatcgcgctcaatcaataccggatgagtggctaaatattcatttatctctgtcagagataaaggcaaaggcaccccagccattccagcataacgtcgggcacgggatattaccgaataggcgtacaacaactccttaagcaccgggtctatttctggttccggtatcggtggcaacctgagtttttctcgcttccatcttgccttttcccccctttctcccccgaactccgataaccaccggtgggcagctat

SEQ ID NO: 462540 - DNA, 622 bp, Sorghum bicolor
  unsure (1)..(622): unsure at all n locations
gtacagttgntcatcattgcttattttgacgatccacgatacagaaaagataaaaggggttcaggaattgttaaatttagatataggaccctagaggaagaatatcggacccgagaggaagagtataggactcgagaggaagactcagaagacgaatatgagagcccagagaacaaatataggacccgagagggagagggcgaatatgaaatcctagaagacgaatataggactctagaggacgaatatgaaaccctagaagatgagtatgggatcctagaggacgaatataggactctagagaaagactcagaggaagaatatgggagcctagagaacaaatataggacccgagagggagagggcgaatatgaaatcctagaggaagactcagaagaagaatatgggagctctgaagatggctcagagaaggaatatgggactttagaagaagactcagaggaagactcagaggaagactcagaagacgaatatgggagcccggaggaagattctatcttaaaaaaagagggttttattgagcatcgaggaacaaaagaatttagtctaaaataccaaaaagaagtagatcggttttttttcattcttcaagaactgcata

SEQ ID NO: 462541 - DNA, 686 bp, Sorghum bicolor
  unsure (1)..(686): unsure at all n locations
ctaatcagaggtacagtagttcatcattattatcgggcaaggacaccagaatttttactagaagtggaagagttacacaaagttcgcgaaatgatcacaagggtttatgcactaagaacaggcaagcctttttgggttgtatccgaagacatggaaagggatgtttttatgtcagcagacgaagccaaagcttatggacttgtcgatattgtaggggatgaaatgattgacgagcactgcgatactgatccagtgtggtttccagaaatgtttaaggattggtagtgggtggattccttgtaaatttatttcaaacctaaattcgggttttatgctatagaaaatagaaatacttcatgatgatgaatcatcaggttaagatcgatctaaaccaatccattttatatatacaatacatacgacatgccaacggttaaacaacttattagaaatgcaagacagccaatacgaaatgctagaaaatcggccgcgcttaagggatgtcctcagcgtcgaggaacatgtgctagggtgtatgtgcgactcgttcagatcatgagttcaaacaaataataaaatttttgaagtatccctgatcggtaccaatgaataggatagagaagctctatcctagatntctatggtatatggaatttatggtttcctttggtgcaaatccaatcatc

SEQ ID NO: 462542 - DNA, 589 bp, Sorghum bicolor
gtacagttgttcatcaaaataatccaagaaacatgaccggtatagggactactaaggggactaaagaaacaagaacaacaacgactaattcatccgccaatatatttccgaaaagtcgaaaactaagtgataacggttttgtgaaatcttctaggatgttaataggtaaaaggattggggttggtttaatatatttttcgaaataactcaatccttttttgctaagacccgcataaaaatatgccgctgatgttagtaaagctaaagcaacagtagtatttatatcattcgtgggcgctgctaattccccatggggtaactctataattttccaaggtaaaagagcgcctgaccaattcgaaacaaaaataaaaaggaacatagttccaataaagggaacccagggaccatattcttctccaatctgagttttgctcaagtctcgaataaactcaaggacatattcgaagaaattctgaccatcggtcgggatggtttgtggattccgaacagctatgataactgaacctagcaaaatagtaattacgaaccaagaagtgatgagtacttgggcatgaatttggaaacc

SEQ ID NO: 462543 - DNA, 670 bp, Sorghum bicolor
gtacgttttcacatggagctctttttctattatttctttctacgctatccttaatagggggttggttacatctacaacccaaatggaagccaagcctttcgtggttcaaaaacgccgaatctcgtctgaatcatcatttgtcaggacttttcggagtaagttctttggcttggacaggacatttagttcatgttgctattcccggatccaggggggagtgggttcgatggaataatttcttagatgtattaccctatccccaggggttgggtccccttctgacgggtcagtggaatctttatgcccaaaatcctgattcgagtaatcatttatttggtaccactcaaggagcgggaactgccattctgacccttcttgggggattccatccacaaacacaaagtttgtggctgaccgatattgctcatcatcatttatctattgcatttatttttctcattgccggtcatatgtatcgaactaacttcggaattgggcacagtatcaaagatcttttagaagcacatactcctccggggggtcgattaggacgtgggcataaaggcctttatgatacaatcaataattcgattcattttcaattaggccttgctctagcttccttaggggttattacttccttagtagctcacatatgtactctttacct

SEQ ID NO: 462544 - DNA, 499 bp, Sorghum bicolor
  unsure (1)..(499): unsure at all n locations
atagactagaaaatggggttctttatctttcgtatacttataataattgggggtatgggggttgatttttttatttggagagtttccgcaactattatatctatttgcacaaatacctcgacggtttccaatcgttaatacataaagtccgataagcatgtcttgggttggcacgcaaataggatctccaatagcgggagacgggggattcatatgagaaaacataagtaaacgggcttccgcctgagcttccaaggataaaggtaggtgaacagccatttgatccccatcaaagtccgcattgaaacccttacacactaatggatgtaaacaaatagtacgtncctctactaaagtgggntggaaggcctgtatgcctaatctatgcagggtaggngctttgttcaacagtccaggatggccccgcataaccttttgaagtatttcccatacaatggggtcctttacccaaaantacttttagcaattctgacattag

SEQ ID NO: 462545 - DNA, 641 bp, Sorghum bicolor
  unsure (1)..(641): unsure at all n locations
tcatcaagnataactggaagccccaaccgctaagaatcctaatgaacctagaaaaagaatacaggcccagaaaaaattacctctttttcgagaaccttttagaagttctatccatatgtgttctgatcgccaattcatattagatatactaaatccagtagcggtcaattgaaattgagagaataagctaaatgatttttactttactttttttgattctgaaatagccttcagtagctagtactcctgtgaaataattggttagatacattgactttctattcaaaaaaattagtggatccacttaaaataaaaaaaaactcgctatagtcggctacgcatatgcatgcatttatgctcgtagcttatatctgcatccatagacgttttcatttgtgtgtagaaagagctacataccctatcatattatactacttacacaaaaaaatatctgtattatgatcctggaaatacattgagaaaatttggccccgtcgtttctagacaatcttatttttctgcacataaagaaataaggaagtcattgcaattgccggaaatactaagcctactaaaggtacgaaaatagaggggtaagttaagatctgtcatagaatatgtgtctcaattcaaatttacta

SEQ ID NO: 462546 - DNA, 606 bp, Sorghum bicolor
  unsure (1)..(606): unsure at all n locations
atcaaaacgcttttcttctcctcttattccatatggaatacaatgagttaaaataagagggagggggggaatattcaaccgtttgctccaaaaagaggatgaaatccatcctattaaaaaagaaataatccgaaatagaaagaatttttttttcaaattaaattctttatttatcttttattccaaaattccccctttttccaatttggggggcaatggcnttanatgatctanttcttaatattattagtttacttaattgacagattccacaacaaatctcttgattcggaattagggactcatgttccgtctgatgaatcgattttctctttttttttacacttctgtatctcactctatcttgttttttagtattatctaaaataaccaatgaattatgaattttccataacttaaaacttaaacttaggtaagtgctttaccaacattatgtagtgtaataaaaaaaaatggaatttaaccccttcatgcttactataactagttatttcggttttctactggctgctttaactataaccccagctctatttattggcttgaacaagaaacctcttatttgaaatgaattgaatgaataga

SEQ ID NO: 462547 - DNA, 295 bp, Sorghum bicolor
  unsure (1)..(295): unsure at all n locations
catccttattcaccctaactacgtctataacaccagttccattctcattcactatatccatctggacttataacctcattttacacgagggggatacctaacttatnncaataaaaanaancttcggggtacctagcaccaaacagaagctacaacacaaatctcggattaaaataactagatcgaaatcccaaaagcacctttaactcctctaatccagacagcaaaacacctgcaactaaacactatacccaagaaaaaacaaacaaccctatacgccacaaaggacacctaa

SEQ ID NO: 462548 - DNA, 582 bp, Sorghum bicolor
gtacagttgttcatcaagcctcttttactgcaggattaactgcattttatatgtatagggatatatttacttacttttgatgggtattatgcgtgttaattttcaaaattacagtagtactaaagaaggatcgttgtattcaatatccttatggggaaaaagtatatccaaaggagtcaatagggattttgttttatcaacaatgaagagtggagtttcttttttttcacaaaatatacccaaaattcctgctaatacaagaaataagataggatcctttagtactccctttggggctaaaaaaacttttgtctatcctcatgaaacgggaaatactatgctatatcctcttcttatatgactactttttactttgttcattggatccataggaatcccttttgataatggagtaaaagataatagaatattggagttaaccatattatcaaagtggctaactccttcaataaacttgttccaagaaaattctaattcttccataaatccatatgaatttctcactaatgcaatttcttctggaagtttagcaatttttggtctattcatagcatatatctt

SEQ ID NO: 462549 - DNA, 410 bp, Sorghum bicolor
tgctcgtgatacactaaaagactcgtctaacgccataacgtaaccgtggggtgattgcaggctgaaaggatgcatggatccgacatgcaacgagtaggaccaaagaaggcgagcgggggcgcagctggtgcataccagacaggtgccggcaactacgcaaagcagcaaaagaaacagcagcgaccctacaggaaagtgcggtgagaatacggcccatccttaaccgtatgtgtagacgatgaggcgaacggacaattagatggaagagggccgctaatatgcccaaagtacccgcaggaaacgatgcgaagctatcccggccggaacgaaaggatcaaaacctgctgaaccccacacaggcaagacagaaagccctttaggagtgaggaaggaaggaacccacacgcata

SEQ ID NO: 462550 - DNA, 620 bp, Sorghum bicolor
  unsure (1)..(620): unsure at all n locations
gtacagtttttcatcattaaagggtagaagtggaatagaatacccagttgaagagtaatgatcatacgtgtgtgatgcattgtatgtcccagaataggtcccattcttctaccctttccgggtagtcgatggctattcacagctactaccttaacaccaaagaagagttcgacccaatgctttatttctgtcttagtgaatcccgattcgacattaaaagtgtattgattctttcccaataaacgaagactcttttctgtaaatactgcgtatttgattccattatcgtacgataatactatatttttatttatatttgtttattgtattatacctttctatattctagatatatagaatagaagaatctcgatttgtcaagtctcatgatcgtatcaagatctatttaaattcggctcaatcttttctaaaaaaaagactgagccgaatttaattgcaatcaattagaagaataaagaagaattactgcatttcttaacttattttttctctttctatttttcttcttttttattttatttagaccttctttatatctaggtntatctactgatatctataagggatccatcgcttttgaaagatcaaatttgatctcc

SEQ ID NO: 462551 - DNA, 580 bp, Sorghum bicolor
gtacagttgttcatcataagaaggggtttcgttctagcgcccggaaataatattccaaagcctttgtatgctctccattgcttgtgtgtataaggcctatgttatatagtatataacttcgatcatagggatcaatttctagtcgcgtagcttcataataattctgcaaagcttccgcataatttccttcggattgagccaacatccgttacggtcgttcattctattcaaaaaatctccgttccaaaaccgtacatgaggttttcatctcatacggcttctcccttctatactctcatatggcttctcccttctatacctagtactaagcgaaaaatctatagaataaaaatagaattagtcccatctcattatggaccgaagggggctggtatttttccaagaaatctctagccaaccttcccccaagaggtttttcttaacaccaatgaattatattaatgctagaggaaaacgatagctccaagaatttctttgttctcaacgcctcctatttagaggaattagccacttcaacgacctttgatggttataagggtatccaaagtacaaacctgat

SEQ ID NO: 462552 - DNA, 608 bp, Sorghum bicolor
  unsure (1)..(608): unsure at all n locations
catcatgattccaaccagaccctttcatttaagacttggattttttattttctttaatcgcctttgtcatttcttcaatgattaattggaattccaattaatcattttgactggctgtttttacataaataataagtaaaaaggcagtaggaactagaatgaacaatgctgtagcaataaatgcgagaatattgacttccataacctctgtaggggtttttttcacaataactcgggatgtaatcccatggagaggaaaaaggggtatcctgtaaattcaaggggaggacttgcattctgataatactgaatcaattcaatattatgaatattggatctatcaaatcaattcatggttgatagtggaataatataacataggaagatctcttatccatactaagaccaaaatgggttttttgattggattcgaaaccccctctattctatttttcattcttttctacttttgtttttctatatgtataatccaaaatctttcttatcttatccaatttcccttcctttttcttatagttatacatacaattatgtatgtattatatgaccaactttctatgggtcacatagacatnccaataagcagt

SEQ ID NO: 462553 - DNA, 560 bp, Sorghum bicolor
  unsure (1)..(560): unsure at all n locations
gtacagttgntcatcattatatcactggatctcgatttttcatatataaacgtaactaacctatctcctgtgtaagggatttttccataatgaccatgaacagttgctcctatagtggccaaataaggcttagctgctcttagaacaaaggagtccatattaacaatgaaaatttgaccagatttttttatgtgtgatttaaatagacataaattttcacgagtggattgtccaaggtgaattattgccaatgtctcttcccatgagtcatgatggagaaagtgccaattcaaatggaatggctccaacatgatgttactgccaaaattcgaaatcctttgattttcgtctattaaagagtatttaagtccttgaagtacttggaaggtttgtttcaaattgtcaaggaacaagtatttttttaacaagatctgattatgcgttaataaatagtaagatgaagaaaaattcgatatactaggtacaataacgcctaagagcccaaaaacatctcgaataggaattctaggattcgattcttttaccgcattgggatattt

SEQ ID NO: 462554 - DNA, 629 bp, Sorghum bicolor
  unsure (1)..(629): unsure at all n locations
ggtacagnatttcatcatcaagagattcgttgcgagatcacgaatcatattacaggtctgatggtatatctcagtatagaagatggaaatagcgatatttttttgtttataaactcccctggcgggtggctaatctcaggaatggcgatttttgatacgatgcaaacggtgacacctgatatatatacaatatgcctcggaatagccgcgtccatggcctccttcattctgcttggaggagaacccaccaagcgtatagcattccctcacgctaggattatgcttcaccaacctgctagtgcttattatcgggcaaggacaccagaatttttactagaagtggatgagttacacaaagttcgcgaattgatcacaagggtttatgcactaagaacaggcaagcctttttgggttgtatccgaagacatggaaagggatgtttttatgtcagcagacgaagccaaagcttatggacttgtcgatattgtaggggatgaaatgattgacgagcactgcgatactgatccagtgtgggttccagaaatgtttaaggattggtagtgggtggattccttgtaaatttatttcaaacctaaatttcggttttttgctatagaaaatagaaatac

SEQ ID NO: 462555 - DNA, 657 bp, Sorghum bicolor
gtacagtagttcatcagaaggcgataataaatacggaagttgcggtcaataaggtagggatcatcaaaacaccgaaccatccaatgtaaagacggttttcggtgctagttatccagttgcagaagcgaccccacaggcttgtactttcgcgtctctctaaaattgcagtcatggtaagatcttggtttattcaaattgcaaggactcccaagcacacgtattaactagaaagaaaatagataatagaaggcttgttatttaacagtataacatagtctatataccaatgtcaaccaagccagccccaacaattggattttcgtataacttcatttaccaaatccaaaaattttggaaatgaagttagtaaaaattcaaaactcagattgctcttttctattttccatatgggttgcccgggactcgaacccggaactagtcggatggagtagataattcttccttgttacaatagaaaaaacccctccccaaatcgtgcttgcatttttcattgcacacgactttccctatgtagaaatagccgatttctattccgaagaggaagtccactaaattttagaatttttaattagttaaagtgattcacctactatggaacatttcagaatggaaaatgtgcaagttttatcttgatat

SEQ ID NO: 462556 - DNA, 684 bp, Sorghum bicolor
gtacagttgttcatcactgtagcactcatagccacagctctaactcgattatttcctaataattgttgtgcctcacaagtcacattaatttgcttatcggcagtgtctcgactcttgactatcaaagcattataaatataaggcaacttgcccgggggaaaagtgatatccagcacgggtccaataatttgatcaatacgccctacgcttttttcttcaattgtggaaaccccgggacgcgaagtagtaggattggttctcataattatcacataattttcaaaaaaaaggaatttatcgaaatttttttttcttgttgaataatgccaaatcaaatcaaaaaaaatatccaaaaatccaaaagtcaaaaggaaatgaattaagtaattcaataaaaaagaaaaggggactcgcacttgatttcgttacccaagcaaatcccattcaatcgtttacttatggaatgagtccgttggaaagttcaatcaatttttttcatataaatttcgccttttgggaagcatctgtgcctactctactttcctatctaggacttcgatatacaaaatatatactactgtgaaacatagattgctgtcaacagagaattttcttagtatttaggtatttagattcaaaatatcaaaggggcctattaagaacttttaaaattgtaaaataaag

SEQ ID NO: 462557 - DNA, 323 bp, Sorghum bicolor
  unsure (1)..(323): unsure at all n locations
caccaaagaacaagcagacgcaacgggggggggcggagcccacgaagaaaacggaccggaccaaaacaaaaagcggcgaaaagcacgagggaccaaacggaacaaagcagcnggagaagagccaacaccnagagccaacagcanacaacccaanngaggggggggggaanaggccaagccccaccaaaaacccncngagcaagagcaaaagngganccaaagaagagagnnanngnaccgaccaaagaaacgaaacccaccaacaagggaagaggaaggaaaagaggaagaagncccgcgcgaagaaaaaaccccgcagcaac

SEQ ID NO: 462558 - DNA, 541 bp, Sorghum bicolor
gtacagttgttcatcattattctatgctaaccaattaaatccctttaactaaaaagggctacatcttgcgtattctgatctttggattgcgcaaatatgagaatatccctcctcccttcttaatcttataaagcatggactaaggtaccccctacatcttggccgctagggcaactttatttattctactattacgaagacttcgaacatacgctggacctaggagattgccgggatctatagctgcctgaggtagcatggtatctacctatagactactggctccttacagttaaatggaatggtgtttcggcacccagcacaactgaaccgctgagccatagaaacgatagctatgctcatgcactgtactcatactacacctcggtaacaactcagacaatctcacgtggttgaaatatctatgactgactatcgaccggtgcatgccatctcatacggactcgcttccttacttgagttaaccgaggggagctaagcctgtctggaagcactgtagatcgatcaatggctgagatca

SEQ ID NO: 462559 - DNA, 688 bp, Sorghum bicolor
gtacagttgttcatcaaattcgaccagatccccatgagtgggactccgcccataacataattgacagatccaagatgtgctccggcaagtaaagggggttctaatatatattggttgtgctcgaaacggttgtgctcgaaaggcagttatgaatcgattgactaatccaattccaatatcttgatttcgagaagcaatgcatcgtgaaccaatatatatatcgtctgctaatacacgaccaattagtgtttggacaaaaagtttttccgtcatcccattttgaggactcacagaaataccttggatagtaccacaatctcttctacgcacaataatatgttgaactacttcaacaagtctacgtgtaagatagccagcatccgctgttcgtacagcagtatctacaaccccttttcgggctccgtagcaggaaattatatattctgtcaaagaaagtccctcgcgtaaattgctttgaataggtaaatcaatcatttgtccttgaggatccgccattaaccctctcatacctactaattggtgtacctgagatgcatttcctctggctcctgaaaaagacattagatagactggattagaaggatccgttattcgaaaattcgaattcatttcttgtttcaaatattcacttgtagcataccatatctcaacggattggcgtattttt

SEQ ID NO: 462560 - DNA, 596 bp, Sorghum bicolor
  unsure (1)..(596): unsure at all n locations
gtacagttgntcatcaatcttttttttctctttctgggggtatcaaactgccacctaatatcttatcgcggtctggaggaaaatgaatatctccggaaaagattttgagttctgtatggcttttttttctcttcactcggaccaatccacctagtcgacttcttgtattttttgtgagttgtgtatcgactccaataatactattgtcaagtacctttaggggtgaggatctcggccagatatgcagttcttgaagaatgaaaaaaaaccgatctacttctttttggtattttagactaaattcttttgttcctcgatgctcaataaaaccctctttttttaagatagaatcttcctccgggctcccatattcgtcttctgagtcttcctctgagtcttcctctgagtcttcttctaaagtcccatattccttctctgagccatcttcagagctcccatattcttcttctgagtcttcctctaggatttcatattcgccctctccctctcgggtcctatatttgttctctaggctcccatattcttcctctgagtctttctctagagtcctatattcctcctctaggatcccatac

SEQ ID NO: 462561 - DNA, 603 bp, Sorghum bicolor
  unsure (1)..(603): unsure at all n locations
gtacagttgntcatcatgctactctttntgaaagaaaaaagaataggagttcccgaagtaatgtctaaaccgcaggggtgtcacaaatcaaagataaaggattccggaacaagtaaacacgattttcaaccgtctcaacaatagaattagatcagaataaggaataaaagtcaatttgttcgagatgagataaagaaaagagtttagagacgactcaaaaaatgggggggggtttttcttttgaagtttgtcagtcaaaattagccaacttgagtcatgagtataaatgaaatttgttttttattttctttaaggaaattaatgcaagtcataatcgaatttctatctatttgcattatagacagaaattcgaatcattttctcgagccgtatgaggagaaaacctcctatacgtttctaggggggggttgtttatctacatctatcccaataagctatctatcgaatcgttgcaattgatgttcgatctcgaagagaaggaagagatcttcgaaaagtaggtttntatgatccgataaagaatcaaacttgtttaaatgttccagctattctctatttccttgaaaagggtgctcaacctac

SEQ ID NO: 462562 - DNA, 451 bp, Sorghum bicolor
  unsure (1)..(451): unsure at all n locations
gtacagtatttcatcagtnatagggaactagattagcttagctacctatctaatttattgtagaaattccgggatccgcgattggacatggaaaatagaaaaactttttcttggttaaaggaacagatgattcgatcgatttctgtatcgatcatgatatacgtaataactcgcacatctatttcaaacgcatatcccatttttgcgcagcagggttatgaaaacccgcgggaagcaactggacgaattgtatgtgccaattgccatttagctaataagcctgtagatattgaagttccccaagcagtgcttcctgatactgtatttgaagcagttcttcgaattccttatgatatgcagctgaaacaagttcttgctaatggtaaaaagggagggttgaatgtgggtgctgttcttattttgcctggaggattcgaattagcgccgcccg

SEQ ID NO: 462563 - DNA, 570 bp, Sorghum bicolor
  unsure (1)..(570): unsure at all n locations
catcatctacctttttgacagcccatctttttgtctcagtagagtctttcagtggcatgtttcagtcctcttccccattacttagaaaaagtgagccaccggttcaggtacaagatactatcattaccgcctggacaattagacagccaacccgtaatcgcaacgacccaattgcaagagcggagctctaccaactgagctatatcccccccgagccaagtggagtatgcatgaaagagtcagatgcttcttctattcttttccctggcgcagctgggccatcctggacttgaaccagagacctcgcccgtgaagtaaatcatcgcccctacgatccaaccaattgggagagaatcaatagactccttttcgggagcgattcatccttcccgaacgcagcatacaactccccgttgtactgcgctcttcaagtgtgcttcttcccccttctcccccttaccatggcaagtccttgngaaataactncgatgggcaaaaaaaagaaagggttaagagacccgcctggcccaaccctagacactttagatccctttcaaaccctgtctgctc

SEQ ID NO: 462564 - DNA, 624 bp, Sorghum bicolor
gtacagtagttcatcatgtattttgtattctatccatgttctatatatttaataagaagttcttactttttctgttctttggaaaaatcgaacacacgatgctcctatttctttatttcattatgagtggtatgctttcgacaataacgacaaaattttcttaattctaattgtccgggcgtattgtggcgattcttttgagtactatatctagaaatccccgtcgattccttattggtaccctttcgaacacaactaatacattccaaaataactcggattctaacatctttgcccttggccatgaacctcctttcctttttggatcgacttaacttaattcttatacctattcttttattcttttattttggatcccaagaaaagaagaaggataaaatccatagaagttcctaactaaaaatgtgatttctaaagattttgttgtaattcttcgaattctcgaacaaatccaatccaatagaataaaaaaaattggaaattcgtaaatcgtaaattaagtaataaaacatagagaaataattaaagaatacaatccttatccatcttttctttctttttgcttcatatactaaaaaagaattcaaaaagggaaaattttcg

SEQ ID NO: 462565 - DNA, 666 bp, Sorghum bicolor
gtacagttgttcatcagttctatgcagcatattgttatcaattgtatatcttgatttgattcctattggatttggattagttcgatttcaataggggttcttcagagtaaaaaaaaggatggaataaaagagtgattggttgaaaagaaagagaaatagaataatgagaatcatatggatttacacaaacctctaatgattagaaactaaaaacgagatctcgaagtaattcgaacgatttcgattatcatttatttgtacttattagttacttctacccgatagagcttagaagttggaagtaataatttcttggttgattgtatccttaaccatttcttttttttttgacacgaggaactcaccatgaatccactaattgctgctgcttccgttattgctgctggattggccgtagggcttgcttctattgggcccggagttggtcaaggtactgctgcaggacaagctgtagaaggtattgcgagacagccagaagcagaaggtaaaataagaggtactttattgcttagtctagcttttatggaagctttaacaatttatggactggttgtggcactagcgcttttatttgcgaacccttttgtttaattcctaaaaagaaaatgagtcctttagattagatacttttttctttttttagta

SEQ ID NO: 462566 - DNA, 640 bp, Sorghum bicolor
gtacagtagttcaccacttgttattcccaataagattgcccgataatagatcgattcatctaaagcccgccctgctcgttccgctcgcaatagtcctattaattccccaggtaaaaaaacattagacattccatcttcggaaacccttacttttgatgttacttggcgtataataatctctatatgtctattatggatctgtaccccttgggatcgataaaccttttggatcttattaaccaaagagatacgactttgggctatggttagctcagctccaatcaagaatccccagggaaccccaagaattcttggtatacgttcattccaatcctcaattctcctttcgagattcggcgatagtgaatcaattgaacgcgcttcgaagatttgttctacttttggaagaccttgcgttatatcactggatctcgatttttcatatataaacgtaactaacctatctcctttgtaaaggatttttccataatgaccatgaacagttgctcctataggggccaaataaggcttagctgctcttaaaacaaaggagtccatattaacaatgaaaatttgaccagatttttttatgtgtgatttaaatagacataaattttcacaaataaatttgtccaaggga

SEQ ID NO: 462567 - DNA, 618 bp, Sorghum bicolor
ggtacagttagttcatcacaatctcaatctggatttgcgcggcaaaaaagatggtactagcgaaatcggaatgccccccgaaaggggcatcgccgaatttcacttccttgtttagatagtgtatgaataggcccgactaaatccttgtatggcttcctctatttctctataaaaagaaatatgaccaagagtggttcgaatgtatatagaacggatttctttttttctatttcccactactagatagtgggcataaatctcatgataagtcccaaaagattcatattgaacttcaatcggaacttctcttgacccaacgatgcgttgatctagtttccatcggagccacaagggactgtttaaaccgattcgtttctgtctataagctcccagtgcatcataggaactagaaaaatggggttctttatctttcgtatacttataataattgttattattgtagttgatttttttatttggagagtttccgcaactattatatctatttgcacaaatacctcgacggtttccaatcgttaatacataaagtccgataagcatgtcttgggttggcacgcaaataggatctccaatagcgggagacaggagattcatatg

SEQ ID NO: 462568 - DNA, 668 bp, Sorghum bicolor
catcaataaaaggggttcaggaattgttaaatttagatataggaccctagaggaagagtgatcggacccgagaggaagagtataggactcgagaggaagactcagaagacgaatatgagagcccagagaacaaatataggacccgagagggagagggcgaatatgaaatcctagaagacgaatataggactctagaggacgaatatgaaacggtagaagatgagtatgggatcctagaggacgaatataggactctagagaaagactcagaggaagaatatgggagcctagagaacaaatataggacccgagagggagagggcgaatatgaaatcctagaggaagactcagaagaagaatatgggagctctgaagatggctcagagaaggaatatgggactttagaagaagactcagaggaagactcagaggaagactcagaagacgaatatgggagcccggaggaagattctatcttaaaaaaagagggttttattgagcatcgaggaacaaaagaatttagtctaaaataccaaaaagaagtagatcggttttttttcattcttcaagaactgcatatcttgccgagatcctcatccctaaaggtacttgacaatagtattattggagtcgatacacaactcacaaaaaatacaagaagtcgacta

SEQ ID NO: 462569 - DNA, 666 bp, Sorghum bicolor
  unsure (1)..(666): unsure at all n locations
caaatggtatcgagaattgatccaatatggatggaatcatgaatagtcattgcttttgtgtactaattcaaacctgctatctatggagaaaattggataaaagaaataagtatttatcggggaacactctgcaaagatacaatttatttaaacccatattctttctatcatatgaatgaaacatagttcgaaaaagaggaataaaagaggtacttaagacttctttatttttattattgaatttccattctcaacagagaactcaagatgatcaatcctgaaatgagaaggatcgaccctttcccaacaaataaactatcaacctcaaaaaaagcggaattaatttaatgaattaatagatttttctgtaacaaaaacaattaactattaaacaaataagctattaaacaaataagctatgccaatgaaaagattggtcgtttttgggtagttataaaattctcatacttcttcgactcgaataacaaaagaaagaaattttagtttgtaaagtaaaattaaggtctttgcttttacttatagcattctttcttttacctaaaagaaagaactcanaataaaaaataagaaaagtacgatttcgaatccattctatccaacgaacagttcttaccttaaccttaccgaaatggatcattctagata

SEQ ID NO: 462570 - DNA, 626 bp, Sorghum bicolor
  unsure (1)..(626): unsure at all n locations
ctttagtgctcatttcggccaactctccattatctttctttggttaagtggcagtgggttccacagtacccgtttttccaattatgaagcatggctaagcgatcctactcacattggacccagtgctcaggtagtttggccaatagtaggacaagaaattttgaatggtgatgtaggcgggggtttcctaggaatccaagtggggtgtggtttttttcagatttggcgagcatacagaataactagtgaattacaactctattgtaccgcaattggtgcattgatttttgcatcgttaatgctttttgccggttggttccattatcacaaagccgctcccaaattggcctggttccaagatgtagaatccatgttgaatcaccacttagcggggttattaggacttgggtctctttcttgggcgggacaccaaatccatgtatctttaccgattaaccaatttctcgacgctggggntgatcctaaagagataccacttcctcatgaatttatcttgaaatcgcgaccttttggctcaactttatcctaaatttggccgaaagagcaaccccctttttcaccttgaaattggtccaaatatgccgaatttcttaattttcgcggag

SEQ ID NO: 462571 - DNA, 400 bp, Sorghum bicolor
  unsure (1)..(400): unsure at all n locations
tcccatnttccttctctgggccgtcttcngngctccgctnttcttcttctgggtcttcctctngggtttcntnttcgccctctccctctcgggtcctntntttgttctctnggctcccntnttcttcctctgggtctttctcttgggtttttttttcgncctgtggggtcccntnctcntcttctngggtttcntnttcgtcctctngggtcctntnttcgncttctngggtttcntnttcgccctctccctctcgggtcctttntttggtctctgggctctcntntncgncttctgggtcttcctctcgggtcctntcctctncctctcgggtcccgtnttctncctctngggncctntntctnnnttttcccctncctggcccccctttttcttttct

SEQ ID NO: 462572 - DNA, 692 bp, Sorghum bicolor
  unsure (1)..(692): unsure at all n locations
gtacagtagttcatcatttttactcataatttctagtagaatagaaattatgagttactataatcgccctttctattatactggaatagaacatagtagaatagaacgactctttcttactttcttaaaagagtttcttacaagagtgaaacaaaactaaagaaagaaaaaataaagtttggcaaaattattaatgcaaaacgatcaattaaagaaaagagttgatactacaattcgactactcaatcaattggtagtatccctagagtccactcctcccccatactactagcgaaagagaaaatgtaaagactaccattaaagcagcccaagcgagacttactatatccatgtaaattatgtctcctatttctatgaaagaattcttctactattgatcaataatcatagtggaatcaagggtacagagtcaaaaggccattctattctgccctaagactatggatgaacccgttaaaggaatttactcctaacaaattcttatatgatttctggtagaattggagagcattaagtagaaatatgatacatcgctctttccctaaaaaagagtaggggatgctctgaatagaagacgcgggaatagagagattttntctttcgtttggtaacctttttataagcaaaggacgtaagaatataccataaaattaggataaataaatatttat

SEQ ID NO: 462573 - DNA, 546 bp, Sorghum bicolor
  unsure (1)..(546): unsure at all n locations
caatatagcatagaaaacaggctgcccatgacggttacgtgtggggtgaaccaggtgcggagtggattggatttttccattcgagggggatcgtataaggtcggcagtaccccctgtgaatactccaccagtatgaaaagttcttaatgttagttgagtccctggctccccaattgattgacccgcaataatacctacagcttcgggggggtcgaccagatccccatgagtgggactccgcccataacataattgacagatccaagatgtgctccggcaagtaaagggggttctaatatatattggttgtgctcgaaacggttgtgctcgaaaggcagttatgaatcgattgactaatccaattccaatatcttgatttcgagaagcaatgcatcgtgaaccaatatatatatcgtctgctaatacacgaccaattagtgtntggacaaaaagttnttccgtcatcccattttgaggactcacagaaataccttgaatagtaccacaatctctactacgcacaataataagatgaactacttcaac

SEQ ID NO: 462574 - DNA, 446 bp, Sorghum bicolor
  unsure (1)..(446): unsure at all n locations
acacaggctaaggcaacacaaagagcttcttcaaacccagcaataacgctaggatctatttggaacaccaaagggcatatgagaccaatgttatcaagtagaagcaaaaaaactacactggagtaggggcacgtccgaacgagatgagaaagagagactacgaaggctataatcaaacacagcagcgcttctactaggagagtactgatggaatctatgaccaacatgagaccgaaagattcgacatatgaggaaggcgggaccgatggaagaaagagaaaggtaacaggcacacggatgacgaacaaagagggatcaaagatctatcctccggaacgacaagaagaaaacgctacgcaccgcatacaggcactacaggaggatctaatacagctagtccgntaggatcggacacacagaaccgacgggctaataaaaacggaacg

SEQ ID NO: 462575 - DNA, 465 bp, Sorghum bicolor
  unsure (1)..(465): unsure at all n locations
gaaatattttttatgggtnttttacggggaagggctttaaaaattattttnacnatccacgatacagaaaagataaaaggggttcaggaattgttaaatttagatataggaccctagaggaagaatatcggacccgagaggaagagtataggactcgagatttttctcagaaagggggtgagagcccanagtacaaatataggacccaagagggaaagggcgaatatgaaatcctagaagacgaatataggactctagaggacgaatatgaaaccctagaagatgagtatgggatcctagaggacgaatataggactctagagaaagactcanaggaagaatatgggagcctagagaacaaatataggacccgagagggagagggcgaatatgaaatnctagaggaagactcagaaaaagaatatggtatctcttaaatggctcaaagaaggaatatcgcacttt

SEQ ID NO: 462576 - DNA, 335 bp, Sorghum bicolor
  unsure (1)..(335): unsure at all n locations
tccttctggaataaaatactggatcctctcccctctttcttgttccttcgtaanagtgaatccattttatgggcgaaaggcgggggctttaaatcgaccgatggattgcttcactcactaacatcattaacaaacaaaagaataaatagagggattccaaccatcagagcaaaggttttctctttgttatttttacaggggggaataggtaaccaatttctagattatggaataaaaccgcgttataacaataagaattccgcgggccctttccgctctaatcagataaaggggagtaaggacccgcttaagttcctactttttttaattgtttt

SEQ ID NO: 462577 - DNA, 474 bp, Sorghum bicolor
taaaagatcattcagagtctacgcgattagattatttattctaattatgaaatagaggttcatgtctggtggggaacgaagcacaaattcttggaattcggtaccaacaggtgtatatcggaaaataacttcgtattcattgaagcctttgaaccaatcaatacgaccgggcctggcaattttcgctgaaactcgagcagtttattgaaaacttgctggatatctgaaactatgtgtgtacaaggtagccctaggaattataaaatagagagtccaagaagggatcgattaatttgacgcactacatgcacaggcctgtgcaaatagtatctattaattagccaaaggaaaaaacatgatacatatcatatactatatcattaacttaagatcgaatcttggataataacaatctgtatgatgctgattacagatctggacgaatcaagatcgataaacaatccgtgtcttatt

SEQ ID NO: 462578 - DNA, 571 bp, Sorghum bicolor
atcaacactaagagatctcaaggcagcacaccccccttccttactttcttgagatgacagagcagaaaaggacaaagaacaggcgcaagctgcaaacttcctacccgaatacaagccttgcacagccataatggaaggagtgagatgactttcacaaagcaatcataaactacgcttatagcttgagagaagcaccacagagtaataactgaagggagaaaaacagatacaatatcgacagattgacctcgaagaaaattgacatcagagaacactgatgaggaagcctcaaactctacagaaagaggatccagaacagactcgtttaaggaaagaccctgcataagctaatttgctctaaatattaccgataaaaaatagaggaatagaggcttggtaaaaagaatcaacgaagatgaatggaactaagaacacataaaacagagcataggagaaccataaccaaacggggctgctaagaaatatattgggtatcgagaccccaacccttaaacccaaggatcaaaacctacaaaaaaaactaaaactagggagcggaaacggaaaaccc

SEQ ID NO: 462579 - DNA, 291 bp, Sorghum bicolor
tcatcaaatgcatcgtgaaccaatatatatatcgtctgctaatacacgaccaattagtgtttggacaaaaagtttttccgtcatcccattttgaggactcacagagataccttggatagtaccacagtctcttctacgctcactaatatgtgcgcctactgcatcgcgtctgcttgctggttcggcagtttcttctttctctcctgtgcggtctgtgacaccgtcttaggtgcactttcagtacaataccgttctgatgcgcgtatagggaggcaattatgacattttttt

SEQ ID NO: 462580 - DNA, 643 bp, Sorghum bicolor
tcatcatttcttaagtttcgattggaattgaacttttgtgttaattgaggaatatgtctattttttctgtgtctaggaccagtaattattgaaattgcctgggcttgaaattgcttctcattctcatagttacgaaatggtaagaaagataaaatacgagcctgttttatagcaacagtaattaatcgttgttgtttcaaggttaatctatgtattcgtctggataatatttttccttgttcactaataaatcgattaattaaactcatgtttctataatcaattcgatcccccgggcctattcgagaacgcctacgaaaaggttgtttggatttacgaaaaggttgtttgaatttacgaaaaggttgcttagatttatgaaaagtttgtttggatttacgaaagggttgcttagatttacgaaaaggttgtttagatatatacatgatttattccttattttaaaatttgaaaaaaaaaaagatttctttattttattaatttttgatccagaaccagaagaagtagtctttctttggtccatatattatttgattaatatactatataaaaatataaaaaatcaaaatatataaaaataaaaaccctctatacatatgaaataatatctacctaaaatgag

SEQ ID NO: 462581 - DNA, 663 bp, Sorghum bicolor
gtacatatttcatcaaaggtgtattttgagtatcccgaattagtatagctatccttcctatggcacagcaatccagttttgcttggtcccgaaacagaattccttttttctcttttttgtttcttgtctataggaaaattacatgttattcaaggcatcaatagaaccccacaatttttttggtcctacttattttcattgtcttcggaatagtagaataattaaatttggaatagcggccaagatcttgggaaaacctaagttaatgattaataagataaagaatttaggaaggatattctcatattgacgcaatacaaagataagtatatgcaaaatctatccctttttagttaaaggaatttaattggttagcataaaataatatctaataaatagaaaatcgaatagtggataatccgttatgaaagaaacggaatacattctttgaagaatcaagattcgtaatcaatccttgtcttgtttgttggattaggtctaactttcttgaccaaacagcaagcatggaactttacaagaagaacttaaaagaaaaggataattgaagtaacttcgaatcaacttttgttggggttcaaaaaacgaataaaaattaaaaaaaaagtaaattcaaggaatagttccctttttgagggggcccct

SEQ ID NO: 462582 - DNA, 653 bp, Sorghum bicolor
  unsure (1)..(653): unsure at all n locations
gaaatactgattttatccttttagatgtaattttgggcaaaggggtatttaaagtataccgaattagtatagctatccttcctatggcacagcaatccagttttgcttggtcccgaaacagaattccttttttctcttttttgtttcttgtctataggaaaattacatgttattcaaggcatcaatgggggcgcacaatttttttggtcctacttattttcattgtcttcngaatagtanaataattaaatttggaatagcggccaagatcttgggaaaacctaagttaatgattaataagataaagaatttaggaaggatattctcatattgacgcaatacaaagataagtatatgcaaaatctatccctttttagttaaaggaatttaattgggtagcataaaataatatctaataaatagaaaatcaaatagtggataatccgttatgaaagaaacggaatacattctttngaagaatcaagattcgtaataaatccttgtcttgtttggngggataaggctaactttcttgaccaaacagcaagcatggaactttacaagaagaacttaaaagaaaaggaaatttgaagaacctcnaaaaaaacttttcgtggaggctcaaaaaaccaataaaaataaaaaaaaaagta

SEQ ID NO: 462583 - DNA, 629 bp, Sorghum bicolor
catcacaaaagtctggacgaatttgttgcttcatccaaatgtgtaaaagatcatagccgcacttaaaagccgagtactctaccattgagttagcaacccagataaaataggatctcttagatacgatcaaaatctaaaaatcgatgaaattacaccggacgctcctgtcaaaacattgaattagcaagacatcaaaagaaagattttctaatccattaaaaacactcaaataccaaaatgaacagatccggttcaatttcactaaggctaagagcagccccaatcacaatggcaaaattgtgatttttttggcaatttttatttaaagaagtaaaataatcttgtatgagagtacatgcaagaggggcaaccctatcatttgaacgaagtgtagacagaaatacctaatatggagtgacaataaagagacccatctatctacaaattctatttgttcaatagacctttgtcaatggaaatacaatgtaattagatagaaaaaggaaataaaatagggacttttgttggattggcacgatataaatgcagcaaaaaaaaataggactaagaaagaaggcaattgtgtctaaataattaaggggtactaaggaccctctcctactttttta

SEQ ID NO: 462584 - DNA, 245 bp, Sorghum bicolor
  unsure (1)..(245): unsure at all n locations
caacagcagccagagaaagaaaaccaaaagagnagagccgcccccacaagccacaacaagaccatcttagggggcccaacagaacggagctcctattacacgcgcaggctcagaaggaagagaccccactatgaaggcatcaacagcgcccaaccaagcactgggtactggcaatagtaccgagcctccgtaggaactactcgtaaaaacgagcataggaaccggacccggggataataaaaaga

SEQ ID NO: 462585 - DNA, 612 bp, Sorghum bicolor
ggtacgtttttcatcatgatcgtttattttgttgggaaagggtcgatccttctcatttcaggattgatcatgtgtgagtgctctgttgagaatggaaattcaataataaaaataaagaagtcttaagtaaactcttttattcctctttttcgaactatgtttcattcatatgatagaaagaatatgggtttaaataaattgtatctttgcagagtgttccccgggggggcttatttcttttatccaattttctccatagatagcaggtttgaattagtatacaaaagcaatgactattcatgattccatccatattggatcaattctcgataccattttgcaatgaaattagaggaatgttatggtaaaacttcgtttaaaacgatgtggtagaaagcaacgtgcgacttgaaggacatgatcgattgtggattttgctatccattattttccatagtaatgaaaatgctcttggctcgacatagtctgttctattcgtcccgaaccgaatttgcgctgggttgtttgtaagtaaagtaaataagacacgatggagctcgagaggacagaattctttttgatcaagggaaagaatctagggtagtgaaaact

SEQ ID NO: 462586 - DNA, 677 bp, Sorghum bicolor
  unsure (1)..(677): unsure at all n locations
gtacagttgntcatcagatgccatgtgaatcgctagaaacatgtgaagtgtatggctaacccaataacgaaagtttcgtaaggggactggagcaggctaccatgagacaaaagatcttctttctaaagagattcgattcggaactcttatatgtccaaggtcaatatggaaattctttcagaggttttcccttactttgtccgtgtcaacaaacaattcgaaatacctcgactttttcagaacaggtccgagtcaaatagcaatgattcgaagcacttctttttccattacactatttcggaaacctaaggactcgatcgtatggatatggaaaatacaggatttccggtcctagcgggaaaaggagggaaacggatactcaatttaaagtgagtaaacagaattccatactcgatctcatagatccctatagaattctgtggaaagccgtattcgatgaaagtcgtatgtacggcttggagggagatctttcctatctttcgagatccaccctacaatatggggccaaaaagccaaaaaaataagtgattcgtntttagcccttataaaaagaaaacggattcttgaacctctttcacgctcatgttacgtcgaggtactgcagaaaaaagaaccgcaaaatccgatccaatttttcggaatcgattagttaacat

SEQ ID NO: 462587 - DNA, 651 bp, Sorghum bicolor
tcatcatttgatcttgtagtccaaagaattccataccactacgtatctgggatagtagtcattagtgaaaaaggaatagttatacaaaggagtaaagtaaacccatctccaatcgtccaataattcttatctttagaccactctgagccgtttacaaacattacagcaaatatgatcaagacatttatggctcccacataaataagaagttgtgcgacagctacaaagtaggaatttaataaaaaatagaataaggatatacaaacaagaactaatcccagcgaaaaggcagaataaattgggttggtaagtaatactactcctagacctcctagtagaagaacaaatcccccaaatagcacaagaatctcatgtattggtccaggtaaatccattatggataagaagaaatttctagtataaaatttttcatgaactgactaaaactaaaagattcaaggaaggaaaaaggtattaggatatttttttgtatatgcatataagttgttaagcagtagttatttttttttccttagagttagtaaaaatggatttttctaataaaaaaatcctaatacctagtaatccgtaatcgttcttgaattccaagatttttcttcgtctattttactttgaggcgaattcctaatt

SEQ ID NO: 462588 - DNA, 580 bp, Sorghum bicolor
tatagaaatagatatctagaaatagaaacgaactaatatatagataatcgaaattgaaaagaactgtcttttctgtatactttccccgttctattgctaccgcgggtcttatgcaatcgatcggatcatatagatatcccttcaacacaacataggtcatcgaaaggatctcggacgactcaccaaagcacgaaagccagttagaaaatggattcctatttgaagagtgcctaaccgcatggataagctcacattaacccgtcaattttggatccaattcgggatttttcttgggaagtttcgggaagaaattggaatggaataatatcgattcatacagaggaaaaagttctctattgatgcaaacgctgtacctagaggatagggatagaggaagagggaaaaatcgaaatgaaataaataaagaataaagccaaaaaaataagtcgaagatagaagagcccagattcaaaatgaagaaatggaaactcgaaaaggatccttctgattctcaaagaatgaggggcaaggggattgataccgagaaagatttcttcttattattagacgtgatttgatc

SEQ ID NO: 462589 - DNA, 91 bp, Sorghum bicolor
ctttgattcttttaaacaagaatctaataaactatgtaattgagcggaaaagaagagaggaaaattagggaaatgggaggggtctcgacta

SEQ ID NO: 462590 - DNA, 663 bp, Sorghum bicolor
tcatcatccaaataccaaatacgctcactttgtgatccatggaaagaaaagtgaattgttttggttttggtgaacatcaaagaaaaaacttgctcttcttccgtaaaaaattcttctaaaaataccaaacccaatcgttgcataaaagttcgtaccgtacttttatgtttacgagctaaagttctagcacatgaaagtcgaagtatatatttgagtcgatacaaagtctgttttttcgaagatccactatgataatgaaaaagatttctacatatccgaccaaaacgatccagaatatcccaatctgataaatcagtccaaacgggtttactaataggatgccccgatccagtacaaaattgagcttttgataaggatccaacgaggggagttgcagggactgtggtatcgaattttttcattcgagtatctattagaaaagaattctccagcatttgattccttactaacaaagtatttattggtacacttgaaaggtaccccagaaaatcgaagcaagagtttgttaattggtttagacgaatcctttgtggttgagtccaaaaagagaaaaaatattgcgagaaattgacaaggtaagatttccatttcttcttcaaaagaagagtgccttttgatgcaagaattgcctttccttgatat

SEQ ID NO: 462591 - DNA, 579 bp, Sorghum bicolor
tcatcagacgaatgttgtgccaattgccatttagctttaagcctgtagatattgaagttccccaagcagtgcttcctgatactgtatttgaagcagttcttcgaattccttatgatatgcagctgaaacaagttcttgctaatggtaaaaagggagggttgaatgtgggtgctgttcttattttgcctgagggattcgaattagcgccgcccgaccgtatttctcctgagttgaaagaaaagataggaaatctctcttttcagagttatcgtcccaataaaaaaaatattcttgtgataggccctgttcccggtaagaaatatagtgaaattgtctttcccattctttcccccgatcccgctacaaaaaaagacgttcatttcttaaaatatcccatatatgtagggggaaaccgaggaaggggacagatctatcctgatggtagcaagagtaacaatacggtctataatgctacgtcaacaggtatagtaaaaaaaatactacgtaaagaaaaggggggatatgaaatatccatagtggatgcgtcggatggacgccaagtgattgatattataccct

SEQ ID NO: 462592 - DNA, 184 bp, Sorghum bicolor
  unsure (1)..(184): unsure at all n locations
caaaactcatatagaatttggaatagattctattataaaaatccatttgcgactgagatagataaaaagaaagttcaataaattctataatcctatttaagaatatcattttagttaagcatatcaagctaactttatctttatgaaattctagtattttttttctaagntggaacccttccaa

SEQ ID NO: 462593 - DNA, 579 bp, Sorghum bicolor
  unsure (1)..(579): unsure at all n locations
atcatcctgtaaccacagtatttctccctttttttctaccccaggctttgcaacattgcnaaatgcgggaaattgcaacaggagcaggtgctattagagaacaattagcggatttagatttgcgaattattatagagaattctttggttgaatggaaggaattagaagacgaggggtatagtggagatgaatgggaagatagaaaagggggaataagaaaagtttttttgattagacgcatgcaattggcgaaacattttattcaaacaaatgtagaaccagaatggatggttttgtgcttattaccggttcttcctcccgaattgagacccattgtttatagatctggggataaagtagtgacttcagatattaatgaactttataagagagttatccgccggaacaacaaccttgcctatctattaaaaagaagtgaattagcaccagcagatttagtaatgtgccaggaaaaattggtacaagaagccgtggatacacttcttgatagtgggtcccgcgggcaaccgatgagggatggtcacaataaagtatacaaatcactttcagatgtaattg

SEQ ID NO: 462594 - DNA, 632 bp, Sorghum bicolor
catcataacagtattgatatacttagaattacataagcaatataccaatgtactaaaaaaagaaaaaagtatctaatctaaaggactcattttcttttttaggattaaacaaaagggttcgcaaataaaagcgctagtgccacaaccagtccataaattgttaaagcttccataaaagctagactaagcaataaagtacctcttattttaccttctgcttctggctgtctcgcaataccttctacagcttgtcctgcagcagtaccttgaccaactccgggcccaatagaagcaagccctacggccaatccagcagcaataacggaagcagcagcaattagtggattcatggtgagttcctcgtgtcaaaaaaaaaagaaatggttaaggatacaatcaaccaagaaattattacttccaacttctaagctctatcgggtagaagtaactaataagtacaaataaatgataatcgaaatcgttcgaattacttcgagatctcgtttttagtttctaatcattagagggttgtgtaaatccatatgattctcattattctatttctttttcttttcaaccaattcctcttttattccatccttttttttactctggagaacccctattgaaat

SEQ ID NO: 462595 - DNA, 565 bp, Sorghum bicolor
cagtcgtccataatatcaaatagatcgttttcttctttagtatctctaccaacggctatagtcatagtgatcctcctattcaattacttcaaccattttcgagcacctcatattacttccagggcatacgatagtttgattatctgtggacgatttctttctcgttcaatgccctttttcagtcgtctcgaagatagaaattttgcatttttatctatggggtcacaaccaaggtcgtgctaaatccacgaatttcatttaattcatttttcttatactatagaaaagaaataaaagaaaagaaataaagaaataaacatttgaattcagcattattccatgatttctatttcaaagcctattttttaagggaaaacccctcttttctcattcgctctctattgcatgggtggaagaacaaaaatagaataggattctgaaaaaaaaagaaagatattgaaaagaaaaattgacttttgaaaccctttattcattatgtggaacggaaaagagttgcgatttcttcttattcctatagaacggctaggtacaagaatatgaaatc

SEQ ID NO: 462596 - DNA, 181 bp, Sorghum bicolor
  unsure (1)..(181): unsure at all n locations
aggaacagcagggcaacagccgagaaaagaaccaaaagaaccgacgcgcccccaaaagccaagagaggagcagcggagggagaccacaaaagacaacagaaagcgcgcaacgacacacganagacaaaagaaggaagagaaacccacagaagaagcaaggcacaggcgacgacgacaagca

SEQ ID NO: 462597 - DNA, 633 bp, Sorghum bicolor
gtacagttgttcatcaatattctaaaaagattggatagcaaagatttctcgttttatctcctttctatgaaagggataaagccataataatttataagcactagaaagtttgacttcagttcgatttagaatagcacgcttagtttctttttcaaaaagaatttgaagggtcttttttgtttcgtagtagtagaattgctagaaaataaaggatttcgttgtagaatcctaaaataaagataaagtactttatttttaaaatacttgccaatctagttatccacctatctacatatcctttcttttatcgtaattgcacttaggtgggccaagaaggccaggctataatctatatcagagcaaattccctcttttttttattcaaaatatttaatgcaatgaaaaattaaagcacgattccccatagggatatgtacataagggggatctgtagataataatgctgttcggacctggagtttccctatatacagattagggaaacatttattcttattctattttattatgccattcaaaataatgggggggggggggaataccgatttaagagtcgttcactactgcaattcaaaaaaaaattatattaattatattatagttaatgggtct

SEQ ID NO: 462598 - DNA, 611 bp, Sorghum bicolor
caccctatggctggatagtaattttcagtgatatacttcttatctgttttggtgagagagtcaaacaatttttagcaggcatctcttggaaaaactttcgagttcaaaactttttaatttttcttaaaaagttttggacggatttgttgaaacgattttcaacaggtaccccttggaaatggggtacttgactattctacaaggatggtagtggatttggaacaaactatgttggagttttatcaacaattttattctaaaaaaaagttgggagtcgaatttatactgcagagtataaaaattatactactgcctgcccaacaaaaaataaaaagcatatcctacatacctaactcctccaggttcagggttttccgtttccgaacactaggaaaagggaggattctagattttgatcctagggttaaaaggaaggggacagatacccaatatgattcttaggaggaacgtttggtaatggttctctatgctcttttttatgtgttcttagttctattcatcttctttgattcttttaaacaagaatctaataaactagaattgagcggaaaagaagagagggaattaggaaatggaggggctcgactaac

SEQ ID NO: 462599 - DNA, 646 bp, Sorghum bicolor
gtacagttgttcatcatattcctttttcactaatgactactatcccagatacgtcgtggtatggaattctttggactacaagatcaaaccaaatagtagaacagggtctcataaataacgttcaacaaattgggattcatttagcaaccgatttttatcttccgtttgaactcatttccctaattcttctagtttctttaataggtgcaattactatggctcgacaataagaaatacttagaatgagtcaaaattcttagaatttcaaatataaaataaataactaaagaatcacaattttgatttagtaaaacccatctactgccaacacaacaaaagagaaaagaaggtatttgttgtgtaattgttctattctaattaattgaatcggttcaattcttgtcctcatattgaaatgaatcgagattgataaggagttagttaatgatgtttgagcatgtactttttttgagtgtctatttattttcgattggtatctatggattgatcacaagccgaaacatggttagagctctaatatgtcttgaacttatactgaattcaattaatctaaatctcgtaacattttctgatctatttgatagtcgccaattaaaaggagacattttcgcaatttttgttatag

SEQ ID NO: 462600 - DNA, 585 bp, Sorghum bicolor
  unsure (1)..(585): unsure at all n locations
ggtacagttgntcatcaattccgctttttttgaggttgatagtttatttgttgggaaagggtcgatccttctcatgggcaggattgatcatcttgagttctctgttgagaatggaaattcaataataaaaataaagaagtcttaagtaaactcttttattcctctttttcgaactatgtttcattcatatgatagaaagaatatgggtttaaataaattggggggggcggagtgttcccctataaatacttatttcttttatccaattttctccatagatagcaggtttgaattagtatacaaaagcaatgactattcatgattccatccatattggatcaattctcgataccattttgcaatgaaattagaggaatgttatggtaaaacttcgtttaaaacgatgtggtagaaagcaacgtgcgacttgaaggacatgatcgattgtggattttgctatccatcattttccatagtaatgaaaatgctcttggctcgacatagtctgttctattcgtcccgaaccgaatttgctctgggttgtttgtaagtaaagtaaatagtacacgatggagctcgagagga

SEQ ID NO: 462601 - DNA, 623 bp, Sorghum bicolor
catcatgctaggatcaaaaacagtcatgggtagttataaagatggtatccttccaagtgggatgagagaattcttactactctctttctttctctcaattgaagaagtaatgtggaaaataaaacagcatgtacaaaaatgagtaataaaccccagtatagactggtacgattcaattcaacattttgttcattcgggttcgattgtgtggggtgggtatagctggaatttggtttatcgttggatgaactgcattgctgatattgatcccaagaaaaaaaccgtgggtacagctaatccgtgaacagccagccatcgcactgtaaaaataggataggttcgatctatggtcattgggggcctcctaaaaggatctactaaattcatctagttgttctaaagaatcaaaacggtcggttattaatggaattccttgtcggctttccgtgaaatactcgtttggtcgaggacttccaaacacgtcataagctaaacccgtactgacaaataaccaacccgcaatgaatagggaaggtatagtaatgctatgaataacccagtatcgaatactggtaataatatcagcaaaagaacgttctcccgtgcttacagacatgctgagc

SEQ ID NO: 462602 - DNA, 619 bp, Sorghum bicolor
gtacagttgttcatcacaagaatattagagctctaaccatgtttcggcttgtgatcaatccatagataccaatcgaaaataaatagacactcaaaaaaagtacatgctcaaacatcattaactaactccttatcaatctcgattcatttcaatatgaggacaagaattgaaccgattcaattaattagaatagaacaattacacaacaaataccttcttttctcttttgttgtgttggcagtagatgggttttactaaatcaaaattgtgattctttagttatttattttatatttgaaattctaagaattttgactcattctaagtatttcttattgtcgagccatagtaattgcacctattaaagaaactagaagaattagggaaatgagttcaaacggaagataaaaatcggttgctaaatgaatcccaatttgttgaacgttatttatgagaccctgttctactatttggtttgatcttgtagtccaaagaattccataccacgacgtatctgggatagtagtcattagtgaaaaaggaatagttatacaaaggagtaaagttaacccatctccaatcgtccaataatttttatctttagaccactctgagccgt

SEQ ID NO: 462603 - DNA, 556 bp, Sorghum bicolor
tatattgagtgtatcgaattagtatagatatccttcctatagcacagcaaaccagattgggccttggtcccgaaacagaattccttgctacactcgttcgattgttgtctataggaaaagtacatgccattcaaggcatcaatagaaccccacaatatggctggtcctacttaggttgattgactctcggaatagtagaaatcattaaattcaggaatagcggccaagaccttgcgaaaacctatgttaatgatctataagacaaagaatttaagagggatatcctcatattgacgcattacaaagatcagtgtatgcaaaatatatcccttttgagctaaaggagttaaattggttagcatagaatactatctaataaatagaaaatcgaatcgtggttaatccgtcatgaaagaaacggactacattctttgaagaatcaagattcgtaatcaatcctggacttgtttgttggattaggtctaactttcttgaccacacagcatgcatgatactttacaagaagaacttataagaaaaggataattgaagtaac

SEQ ID NO: 462604 - DNA, 662 bp, Sorghum bicolor
  unsure (1)..(662): unsure at all n locations
atcattgttactcataatgtctagtagaatagaaattatgagttactataatcgcccgttctatgatactgggaatagaacatactagaatagaacgactctttcttactttcttaaaagagtgtcttacacgagtgaaacaaagctaaagaaagaaaaaataaagtttggcaaaattattaatgcaaaacgatcaattaaagaaaagagtggagactacaattcgactactcaatcaattggtagtatccctagagtgcactcctcccccatactactagcgaaagagaaaatgtaaagactaccattaaagcagcccaagcgagacttactatatccatgtaaattatgtctcctatttctatgaaagaattcttctactattgatcaataatcatagtggaatcaagggtacagagtcaaaaggccattctattctgccctaagactatggatgaacccgttaaaggaatgtactcctaacaaattcttatatgattgctggtacaattggagagcattaagtcgaaatatgatacatcgctctttccctaagaaagagtaggggatgctctgaatagaagacgcgggaatagagagatnttttctttcggttggtacctttgttataagcaaaggacgagagatataccataaaatta

SEQ ID NO: 462605 - DNA, 571 bp, Sorghum bicolor
  unsure (1)..(571): unsure at all n locations
gtacagttgttcatcatccttttcctagttcttcttccaagcgcaggataaccccaaggggnttgtgggtgggttttctaccaatgggggctttcccttcaccacccccatgggggtggtccacagggttcataactacccctcttactacggggcgtttacctaaccaacacttagatccggctctacccaaacttttttggttcaccccaacattacccagtggggcgactgttgctaagcagttttgggataccaaacggacctccccagatggtaatcttaaagtggccaatttaccctcttttgcaatcagtttcgctacagcacctgctgctctagctaattgcccaccccttccacgtgtgatttctatgttatgtatggccgtgcctaagggcatatcggttgaagtagattcttcttttttatcaaaaaaccccttcccaaactgtacaagcttcttccaaagcatacggctttctagatgtatatgacgatctctagacagatggatcttatatgaatcgtatgatgaagtaccacatgagtggatatatagaaaaggaat

SEQ ID NO: 462606 - DNA, 644 bp, Sorghum bicolor
gtacagtatttcatcagtgtactatttactttacttacaaacaacccagcgcaaattcggttcgggacgaatagaacagactatgtcgagccaagagcattttcattactatggaaaatgatggatagcaaaatccacaatcgatcatgtccttcaagtcgcacgttgctttctaccacatcgttttaaacgaagttttaccataacattcctctaatttcatggcaaaatggtatcgagaattgatccaatatggatggaatcatgaatagtcattgcttttgtatactaattcaaacctgctatctatggagaaaattggataaaagaaataagtatttatcggggaacactctgcaaagatacaatttatttaaacccatattctttctatcatatgaatgaaacatagttcgaaaaagaggaataaaagagtttacttaagacttctttatttttattattgaatttccattctcaacagagaactcaagatgatcaatcctgaaatgagaaggatcgaccctttcccaacaaataaactatcaacctcaaaaaaagcggaattaatttaatgaattaatagatttttctgtaacaaaaaccattaactattaaacaaataagctattaaacaaataagc

SEQ ID NO: 462607 - DNA, 171 bp, Sorghum bicolor
cttctctttcgtattttactctttctttattattattatttctcggaacaagagaaataataaaaaactgttagaccgaaactcttttaggaaagaaaaacaaatccatataccatatacaaatggatgatacatatatcataaagaaggaatatggagcaggtagtgagt

SEQ ID NO: 462608 - DNA, 646 bp, Sorghum bicolor
ggtacagttgttcatcaatagaattccttttattttttcttcaaatccaaaaaatttctctttttttttatacataggtcgtcgatttggcattggaaaaaggactgcgtgcccttctagtaaatagttcaaactattttatcgatatgagtgttctatatcagataaattctacactagctatttcccgtttaaagcatttcgagactaatactaatactagtgtagttgtagaaagagtacccctttttgcccggacttcaagcagtttagctttaaccgtgttaatggtctcacattattggtctatagagaatcaaagtaaatttaccaatgaatctcgaaatgctatggttcttccatatgatttctgaagttattcagaagtaattcgtcgagatcgtgcaccttttcttatttatcaaaaaaaaatactaaaaatattctaaagtgcagccggatagatccaatctattcttgaaatagacaactcgcacacactccctttccaaaaaaaatcaatacaccaaccactacagttagatttattaggattgttgctaaaatatcgggattaagcccgaaactcccagcgaatggccagtgagctaaaaaaacgaaagaatgggttacatttttcatatgc

SEQ ID NO: 462609 - DNA, 596 bp, Sorghum bicolor
gtacagtagttcatcaggcgctaattcgaatccctcaggcaaaataagaacagcacccacattcaaccctccctttttaccattagcaagaacttgtttcagctgcatatcataaggaattcgaagaactgcttcaaatacagtatcaggaagcactgcttggggaacttcaatatctacaggcttattagctaaatggcaattggcacatacaattcgtccagttgcttcccgcgggttttcataaccctgctgcgcaaaaatgggatatgcgtttgaaatagatgtgcgagttattacgtatatcatgatcgatacagaaatcgatcgaatcatctgttcctttaaccaagaaaaagtttttctattttccatgtccaatcgcggatcccggaatttctacaataaattagataggtagctaagctaatctagttccctatacacgagtctgttgtcattctactgcaatagttgtactagaatgatgaataccttgagcaggtagaaatagaaagaattttgttaaaaaggaaaagggctttctttctaaaggaagaaatatgctaatttgattaatattaggaaatcaaatg

SEQ ID NO: 462610 - DNA, 369 bp, Sorghum bicolor
gtacagtttgttcatcaagtagtcttagattttgcattttgatgagcctcgttttgaggaattcatggaataatccattttcatggaataaagaataagaacaaggatatgagtctatcgcttaaaagaaaagatctcatgatagtcaatatgggtcctcaacacccatcaatgcatggtgttcttcgactgattgttactctcgatggtgaagatgttattgattgcgaacccatattagggtatttacacagaggaatggaaaaaattgcggaaaacagaagtattatacaatacttgccttatgtaacacgatgggattatttagctactatgtttacagaagcaataacggtaaatgcaccagaa

SEQ ID NO: 462611 - DNA, 640 bp, Sorghum bicolor
gtacagttgttcacacagttttctgttgaggtctatcccgtagaggtagtcaaattggatcagtgatcgatttctaggtttcgtcgtaaacctaattggttacttccaattacgtaaatcaatagttcaaaccgcactcaaaggtagggcatttcccattgatataggaacttttgtaccagaaacaatagtatctccaattatagcccctctgggatgtgaaatatatctcttctcaccatccccatagtgtatgagacaaatgtatgcatttcgattagggtcgtattctatggttacgattctaccagatatgtctttttgattccgtcgaaaatcgattttacggtataggcgcttatgacctccccctctatgccttgcggtaatgattcctctggcattacgacctttaccacaacggtgccgtccatggatcaatttatttcgtggattggatttcacttgcctgtctacggttcccttgcgtgtgctcgggataggtgttttgtataaatgtttcgccgtattattaagtattctcctttaggtcgtttctctatctagaagcggaatagaataacccggttgaagggtaatgatcatacgtctgtaatgcattggatgtcccagaataggt

SEQ ID NO: 462612 - DNA, 626 bp, Sorghum bicolor
  unsure (1)..(626): unsure at all n locations
gtacagttgttcatcacagnaggacatatgaatattacaccatgttccattaaaacactcaaggggttatatgatatatcgggtgtagaagtaggccaacacttctattggcaaatagggggtttccaaattcatgcccaagtactcatcacttcttggttcgtaattactattttgctaggttcagttatcatagctgttcggaatccacaaaccatcccgaccgatggtcagaatttcttcgaatatgtccttgagtttattcgagacttgagcaaaactcagattggagaagaatatggtccctgggttccctttattggaactatgttcctttttatttttgtttcgaattggtcaggcgctcttttaccttggaaaattatagagttaccccatggggaattagcagcgcccacgaatgatataaatactactgttgctttagctttactaacatcagcggcatatttttatgcgggtcttagcaaaaaaggattgagttatttcgaaaaatatattaaaccaaccccaatccttttacctattaacatcctagaagatttcacaaaaccgttatcacttagttttcgacttttcngaaatatattggcggatgaattagc

SEQ ID NO: 462613 - DNA, 594 bp, Sorghum bicolor
gtacagttgttcatcattcccgaatcgaatcgatttaaattaataaaagaataaggaaacgctacctcatccctattggtaaccgtttgggccactgcccacaaaacaaaccctagtttgagggtagaactatggtatggattctcaaaatccagtatcgccaaacctagttactctcgtgccccaacttaggggggtacgaatttgtcgagtttgatcagtactataatcctaagtattttattgatcaggcggcacccagatttgaactgggggtaaaggatttgcagtcccctgccttaccacttggccatgccgccaaaaaatccgatctaaaatcgataaaagagcaagtattcatccacatttttttactaattactaaaattactaaaacctttttttcttttatcttgaatctaattctacttactttcttttttcgaatctttttcaaaaaatcgatttctgcttttttggatccagtttcgcttattctcctcgatggattctatcttaaaacacacattgctaacactagaaaacttcccgtttctttctattctattgagatgacaaagaagaaaaagtgga

SEQ ID NO: 462614 - DNA, 210 bp, Sorghum bicolor
atcaaaactattttcttggttatcagccagtctttatttttttgattatttctagatcggggtggggggaaagaacgctcgtttggagtcctattgaaaccaagaaatataggcctgcttgccatctacaccataataaattgagtttttccaagaaacctgctatgtggaggaaggcctcctaaggataagatacattttggctaaaga

SEQ ID NO: 462615 - DNA, 462 bp, Sorghum bicolor
  unsure (1)..(462): unsure at all n locations
aacacctatattgggagttactctacgtattgcttttcgtaaaaccaatattgggtgttgtgtgtcttttaaaaaatctttttcacngctcgatagagaatttgataagccaatgatttttttccgtctttcataatacggttaaccaccatgttaactaatcgattacgaaaaattggatcggattttgcttttcttttttctgcgggacctcnacntgacatgagcgtgaaagaattcaagaatccgttttctttttataagggctaaaaacgaatcacttatttttttggctttttggccccatattgtagggtggatctcgaaagataggaaagatctccctccaagccgnacatacgactttcatcgaatacggctttccacaaaattctatagggatctatgagatcgagtatggaattctgtttactcactttaaattgaatatccgtttccctc

SEQ ID NO: 462616 - DNA, 685 bp, Sorghum bicolor
  unsure (1)..(685): unsure at all n locations
gtacagtttgttcatcacatatatattcttcttttctatgtattagattattcgtccgagccatatcaaattgaaaatatctgaaatcaaattcaatatagaatttggaatagattctattagaaaaatccatttgcgaattagagaaataaaaagaaagttcaataaattctataatcctatttaagaatatcattttagttaagcatatcaagctaactttatctttatgaaattctagtattttttttctaagtggaacttccaatttagaactagttaataactaagattaataattaagatctgatattttacagattccctatatatatttttatttgttacactatttctgttatgtaagcccacttagctcagaggttagagcatcgcatttgtaatgcgagggtcatcggttcaaatccgatagtcggcttttttttctatcgatgttccatgaacaagaatttctttttttctccgaattaaatggggaatccagggtctattatgtcgttttaccttacaattttgctagatacaaagcataaaaataaataatttatatacaanaaatccagatgttgatgaaattccattttttgtgttactccattttttgtggtactttaatagaattaactctgtttatcccttagtttaattctggttgaatttcgct

SEQ ID NO: 462617 - DNA, 647 bp, Sorghum bicolor
gtacagtatttcatcacgaatttcacttccttgtttagatagtgtatgaataggcccgactaaatccttgtatggcttcctctatttctctataaaaagaaatatgaccaagagtggttcgaatgtatatagaacggatttctttttttctatttcccactactagatagtgggcataaatctcatgataagtcccaaaagattcatattgaacttcaatcggaacttctcttgacccaacgatgcgttgatctagtttccatcggagccacaagggactgtttaaaccgattcgtttctgtctataagctcccagtgcatcataggaactagaaaaatggggttctttatctttcgtatacttataataattgttattattgtagttgatttttttatttggagagtttccgcaactattatatctatttgcacaaatacctcgacggtttccaatcgttaatacataaagtccgataagcatgtcttgggttggcacgcaaataggatctccaatagcgggagacaggagattcatatgagaaaacattaagtaacgggcttccgcctgagctttcaaggattaaggtaggtgaacagccatttgatccccatcaaagtccgcattgaaacccttacacactaat

SEQ ID NO: 462618 - DNA, 612 bp, Sorghum bicolor
gtacagttttgttcatcatcgaacaaatccaatccaatagaataaaaaaaattggaaattcgtaaatcgtagattaagtagtaaaacatagagaaataattaaagaatacaatccttatccatcttttctttctttttgcttcatatactaaaaaagaattcaaaaagggaaaattttcgtcatgtcacgaagaattctatctcttgcataggaataactagaatggaaaaaaagggaatgacaaagcatctgggaataaacgattgatttctatcaataaacctgctaaagccccaaaccatagagtacttagcacgggtgctacagagagatatgtttttatatcccgcattgaaaatcctccttccgtattggaatacatatatgatcagatactcttgcccaagatcctttgtatttcttttgtttaggcgaaattcctaactaaaaaaacaaaataaatattctatatatatagaatgaaccggatagacgagattttcctatccctaaaaaagatgaccccttcttcctatacattactaaggaataggagtctttctttcatagggcgaagttgactggatttaaattataccctcccttgatta

SEQ ID NO: 462619 - DNA, 591 bp, Sorghum bicolor
gtacagttgttcatcaaaacaaccttttcgtaggcgttctcgaataggcccgggggatcgaattgattatagaaacatgagtttaattaatcgatttattagtgaacaaggaaaaatattatccagacgaataaatagattaaccttgaaacaacaacgattaattactgttgctataaaacaggctcgtattttatctttcttaccatttcgtaactatgagaatgagaagcaatttcaagcccaggcaatttcaataattactggtcctagacacagaaaaaatagacatattcctcaattaacacaaaagttcaattccaatcgaaacttaagaaactccaaccagaatttaagaaacaacaatcggaacttaagttccgattgttgatgttttattcgaaaggctcagactcatatataaagaaagtaatccaattttgattcttgtgtttgttataaaaaagaaaaatgggaaaaaagaaattgtttttttatttattgcaacatgctcgttgattcctaccacttaatcttaatttattgtatcttcccggaagttcctctccgggaattcggttttaattattc

SEQ ID NO: 462620 - DNA, 682 bp, Sorghum bicolor
  unsure (1)..(682): unsure at all n locations
gtacagtttttcatcaggtttagctacttaaattcaaaaagtgaatcaaagaatttcagtatctagttattagttaaaaaaaaatatatttattaaaatacaaactaatcatttttgtatttctttctgttaaaataaaagagctctgttgtttcgtaattgattgattggattccaaagaaaacctatatttataggaaattctcgaatattgcttatttcatataaaaggaaatcctaatgactagaattctctaagttttagaatgtcttgtttaagagacttggaattcaattatgcaatagctttctgaacttaattaactatttgaattgaattttaccttccttctttttatgcccccctcttatatgagggcttatcccccataccatatatttatatatggagtatatttgatatataaattgatttaaatagaaaatcttaaaaaactcttgtcttatccacattagacaaaatgaactaaagaagaatttagaatttaagtatctttcagtatcatttaagtatctttcagtatctaagtataaatactaagaaaaaacagaaagaaggattgatttgcggcaatagatgtctntcacatacaactagaaaaaagtaattccctttttgaatggcagttccaaaaaaacgtacttcgatgtcaaaaagcgt

SEQ ID NO: 462621 - DNA, 482 bp, Sorghum bicolor
tctcataaataaaaacccagtaaatccattatggataaaatgacattactagaatagaatattacatgaacggactaaaactaatagattcaaggcacgaaaaaggtgtaaggatatggaagggttttttcatatcgggggtgggggactatgtcttattatgaactcatagctagtaaaaacggatagagatagttaaaagtactaatacctaggattgctaaatcgttcttcaattccaagataccgatgggtctattccacttctatgcgacaccctaattcatttgaatactgtaatactgcatggtagataacgccaacctactcaaatcaataagagtgcaatacaaatcatgacgaacataataaaaaagaacatataattacatcatagataaacaactcacgcgcacaattacaacataggtactacaatatatacacactgataaataaatactctaataatacaactactg

SEQ ID NO: 462622 - DNA, 404 bp, Sorghum bicolor
  unsure (1)..(404): unsure at all n locations
gaagagggtggtttaacccaacggtcacactgggaaagatcaagctgcaaaacgcagcccggagcgcacagagaacggagtccgcccaaaccagtcggaagagcgtagcagcagatccataccagatacgttgcgccaactacgaaagcagaagaaaaaacagcggcgatactactggaaagcactgttgcaagaacgcatacacccaacctgatgaaaaaacacaaaggcggacggacaatgangtgcaaaaggcccgctaacaagcaaagagcccccggagaaataaaatacaaagctcataaaaccgggacgcaaggatcaaaagccgacgatccccgcgctgggactaacgaccgcaacccaacaggaagcaaagaaggcacgtgaacgaggataggagg

SEQ ID NO: 462623 - DNA, 667 bp, Sorghum bicolor
aaaatcgaagcaagagtttgttaattggtttagactaatcctttgtggttgagtccaaaaagagaaaaaatattgcgagaaattgacaaggtaagatttccatttcttcttcaaaagaagagtgccttttgatgcaagaattgcctttccttgatatcgaacataatgcataagaggatccataaagaaccatatggttttccgaaaaaaccccgggtacattacaccaaaatgttccatcttcccagaaaagatgattcgttccagaaaggttccagaagatgttaatcgtaagcaagaagattgtttacgaagaaacaacaagaaaaattcatattctgatacataagagttatataggaatcgaaatagtcttttattttcttttttcaaaagaaaaatggatttcattgaagtaataagactattccaattcgaataatagtggagaaagaatcgcaataaatgcaaagagggaacatcttgaatccggtattcaaggagttgaaccaggatttctaaatggataggatagggtatttctatatgtgatagataatgtaaatgcaaaaatttgtcttctaaaaagggaaattttgaatgaatagattgtaaattttgaaactttggtatttctttttcttctggacaagatagttgccctagc

SEQ ID NO: 462624 - DNA, 386 bp, Sorghum bicolor
  unsure (1)..(386): unsure at all n locations
tttttcatagnatttactgggggaggaagaatttgcaaattaataaaacccggcggacgaattttccatctccaggggaaaagactatcatctcctaccagataaattcctaattcgccttttggagcttctactcttacataaagctcttgctttgattattcaaaagtgggtgacggttttttaccaagaaaccgatattcaaaatcattacattntgtaattctatgatttattaaagcgcccggctcctaaatcctcataaaggcctccaagaattatttttacaaccaactgaattaatcgtaaggatacccacataacaccgactcgaactaaaaagccgagccaacgaatctatctatcttataccattggactttcca

SEQ ID NO: 462625 - DNA, 674 bp, Sorghum bicolor
tcatcattcttttctttatggtatagaaagaggtgagattatgtgcccttttcttcattttgcatttcttattaattttgtatgccgctattccgaagaatattttttttattcttgcttatcctactttcctagttgttctaagtaatatgcgcggtacaaagttcgtggtaggaacttctttgagtcattgtatttttctgttcatacgaaggaaacaaatatgtgattttccaaattggaaaatcgaaatgaagccctttttgttcagtctatctggacctttttgtataataggaattaattagaatattatattctaagtatttcgtttcgtctaggaacagaacctcaaaatattcctttactttaataaaatctggaattgtgttgtataagtgaacatgaatttattatcactcaatgagcatcttgtatttcatagaaattgggggttatatagtccttacgtaagggccagcctatccaactttcaggcattaagatacgtttaagacgtggatgattatcataagaaattcccaccatatcataagattcgcgttcttgaaaatcggcacttctccaaacccagaaaacagacgggattctaggattatccttttgggcaaagacttttatgcatacctcttctgggttatctataccatact

SEQ ID NO: 462626 - DNA, 630 bp, Sorghum bicolor
  unsure (1)..(630): unsure at all n locations
gtacagttgntcatcaaaacaaccttttcgtaggcgttctcgaataggcccgggggatcgaattgattatagaaacatgagtttaattaatcgatttattagtgaacaaggaaaaatattatccagacgaataaatagattaaccttgaaacaacaacgattaattactgttgctataaaacaggctcgtattttatctttcttaccatttcgtaactatgagaatgagaagcaatttcaagcccaggcaatttcaataattactggtcctagacacagaaaaaatagacatattcctcaattaacacaaaagttcaattccaatcgaaacttaagaaactccaaccagaatttaagaaacaacaatcggaacttaagttccgattgttgatgttttattcgaaaggctcagactcatatataaagaaagtaatccaattttgattcttgtgtttgttataaaaaagaaaaatgggaaaaaagaaattgtttttttatttattgcaacatgctcgttgattcctaccacttaatcttaatttattgtatcttcccggagttccctctccgggaattcggttttaattattcctgtatatgactnttttatcctttaattgatagtcctta

SEQ ID NO: 462627 - DNA, 473 bp, Sorghum bicolor
  unsure (1)..(473): unsure at all n locations
tacagtagttcatcaaagngnatccaggacctcttggtcctgaatatcagaataggacgaacgaaccggcctccgcggatatctttgcttcggaacaaaacaattagcattaggctcggtcaactggaatgtgtattatccatatgggagatcttccaatcgagaagatccatcgatctgagacgaagagaaagggcccattttctttacttattcagttaaaccaaggattcgttatggaaacagatagcaacaaccatttcatcagacatgcgtatttttgattatccggtggatttacacagtttcattaatgcaaattgtttgatgtagttagtactcaggttattcgacgctcaagaattnttatttaggcagttcatatcatcccatacatagtggtttgatctaagattgcatttctnncatgttttcgnagtaccctattgttccatgtatctagtgttctatat

SEQ ID NO: 462628 - DNA, 582 bp, Sorghum bicolor
gtacagtagttcatcaccaggctataatctatatcagagcaaattccctcttttttttattcaaaatatttaatgcaatgaaaaattaaagcacgattccccatagggatatgtacataagggggatctgtagataataatgctgttcggacctggagtttccctatatacagattagggaaacatttattcttattctattttattatgccattcaaaataatggggggggggggggaataccgatttaagagtcgttcactactgcaattcaaaaaaaaattatattaattatattatagttaatggttctaatttgttctgaattttgcagcctgcgactggaaatccactttttcttctttgtcatctcaatagaatagaaagaaacgggaagttttctagtgttagcaatgtgtgttttaagatagaatccatcgaggagaataagcgaaactggatccaaaaaagcagaaatcgattttttgaaaaagattcgaaaaaagaaagtaagtagaattagattcaagataaaagaaaaaaaggttttagtaattttagtaattagtaaaaaaatgtgga

SEQ ID NO: 462629 - DNA, 647 bp, Sorghum bicolor
catcatgcaatatatttacatagtagaacaaatccaaattggaagggtacgaattccgcacttgtagcttcgataggatttcttataatttggatctgctattttggtatcaatctgttaggaataggtttacatagttacggttcatttacattaccatctaaataattacataacataaaaccttcgggttttttccttttttgtttgatttgagaaccctttgaaaagacgttcaaggggttctcaaaaattcgagatagatctaattagacttttttacttttttcttaatttttaatttttccactctggaatatagagcggactggttaaaaaaagaaaattctatttagtataataattggataatagagcctctaccctatcaacggatagagagagaacaaaatctggataaataccaattcctattactggtaaaaagatacagattaaaagaaagagttcccgtggtccagaatctacaaaatttttgtttggaacatgaaatagcttgtatccatagaacatctggcgtaacatagataataaataaataggagttaatatcattcctattgccattacaaagtaattagcatttttggcattaacataaaattaggactagtaattagtccaaa

SEQ ID NO: 462630 - DNA, 178 bp, Sorghum bicolor
  unsure (1)..(178): unsure at all n locations
gaagagggagaagaggaacnacccaggcaganngaaangaaggggccaaaagaaaagaaanagcaangncaagcncaaacgganagnccaaggcgccccaaaaagggnngccgaggggccaaaccaanccaaaacncaancgaaaggaaggcaaaaaacaaaagaggaaaaagaaaaa

SEQ ID NO: 462631 - DNA, 654 bp, Sorghum bicolor
  unsure (1)..(654): unsure at all n locations
gtacagtagttcatcaaaatatctctcatttccgacgcgaatagatttttttttttaatttcgaaataaaggttcttgtcttgtggggaacgatgcacaaatttttggaatccggtaccaacaggtataatcccccccagaactacgttttctttcaggcctttcaaccaatcaatacgacctcgtagggcagcttttgctaaaactcgagcagtttcttgaaaacttgcttcagatatgaaactttgggtattcagggaagcccttgttattcccaataagattgcccgataatagatcgattcatctaaagcccgccctgctcgttccgctcgcaatagtcctattaattccccaggtaaaaaaacattagacattccatcttcggaaacccttacttttgatgttacttggcgtataataatctctatatgtctattatggatctgtaccccttgggatcgataaaccttttggatcttattaaccaaagagatacgactntgggctatggttagctcagctccaatcaagaatccccagggaaccccaagaattcttggtatacgttcattccaatcctcaattctcctttcgagattcggcgatagtgaattaattgaacgcgcttcgaagatttgttctacttttgga

SEQ ID NO: 462632 - DNA, 456 bp, Sorghum bicolor
gtacagtagttcatcatacctgtaaaccaatcctcgtaagagagtaagatatagacctaggtacgagctacataaaccttaccatcctacaaaaaccatacgatacattctgtaaccagtcgtccttaatagcatagtattatgagaacccttctttaagacctctaccgacggctatagacatagtgatcctgctatttagtcacttcaactcattttcgaacacctcatattatctactagtgcattatgatagctgtctgtatataaagaacaatatctttttcattcaaagcactggatcagacagcctgtacattataatcacgcattgcgatctctggggccacatccatagccgtgcttattccacgaataacgatacagacattaataaaatgctatcgaggtgcagtatctgcaaagtttttgttaagtaacacattaagaattcag

SEQ ID NO: 462633 - DNA, 638 bp, Sorghum bicolor
  unsure (1)..(638): unsure at all n locations
gtacagttgttcatcatcccgaatgctaaggagaagaagaggattgagtcaaaagaaaaagctattttgggagttttatcaacaatttgcttgtgtaggtggggacctggtattttcggagtccttatgcgaggaattacaaaagaaattttttcaacaaaaatgtgaattaggaagagttggtcgacgaaatatgaatcggagactgaatcttgatatccgtgagaacaatacattcttgttaccacgagatgtattggccgctacggatcatttgattggaatgaaatttggaacgggtatacttgacgatgacgatatgaatcacttgaaaaataaacgtattcgttcggttgcagatctgttacaagatcaattcggactggctcttggccgtttacaacatgcggttcaaaaaactatccgtagagtattcatacgtcaatcgaaaccgactccacaaactttggtaactccaacttcaacttcgattttattaatcactacttatgagaccttntttggcacataccccttagctcaagtttttgatcaaaccaatccattgacacaaacggttcatgggcaaaaagtgagttgtttgggtcctggaggattgacggggagaactgcaagtt

SEQ ID NO: 462634 - DNA, 647 bp, Sorghum bicolor
gtacagtttttcatcattatcatttttttaacagcagttcttattgcccctttggcctttttggcccattgttgtgtccgattcaacaattgatacatatttgttctcctcttaaaaaaaaaaggaacttccgttccgagctttggtttggtgagtcgtacgagatcatgtttacatacctatgaacttagcctcttcaaatgtatccgatatatataataatttttgggtgtgtcaactctctgttcatgtattttattatacatgatatgtatatgtatttatttatataataataaatacctatactttgtgcaagtgataagagataatatgaaagattttcttatttttcttaattttctcaagattttaaatctcgccataaaaaaacttcgagatcaagatatatagaaaagaaaatctctacatatctctatatatgtatatattatgtacattaatatatacatataatatgtacattatgcagtagacccataatggtaaatgaaagtggctaattattgaataaaaagcccttttaactcagtggtagagtaatgccatggtaaggcataagtcatcggttcaaatccgataaagggcttttcacttaatggtagaataatgccttggtaagacag

SEQ ID NO: 462635 - DNA, 650 bp, Sorghum bicolor
  unsure (1)..(650): unsure at all n locations
gtacagttttcatcataccccattccaaggggtacctgttgaaaatcgtttcaacaaatccgtccaaaactttttaagaaaaattaaaaagttttgaactcgaaagtttttccaagagatgcctgctaaaaattgtttgaatctctcaccaaaacagataagaagtatatcanctgaaaattactatccagccatatgggtatatgaagagcgcaaattcctttataccccacccaattagaattaggggaaataaaacataaatgtagaaagttctcatcataagatcagccaatagaagaaaaaagtccctaattctgcagaacattctgagcacgtgaaaagtgaatagcctaaagataaaaaaaaagtttatcatttttttaacagcagttcttattgcccctttggcctttttggcccattgttgtatccgattcaacaattgatacatatttgttctcctcttaaaaaaaaaaggaacttccgttccgagctttggtttggtgagtcgtacgagatcatgtttacatacctatgaacttagcctcttcanatgtatccnatatatataataatttttgggtgtgtcaactctctggtcatgtattttattatacatgataatgatatgtatttatttatataat

SEQ ID NO: 462636 - DNA, 604 bp, Sorghum bicolor
atggtacagtatgttcaccaccaggctataatctatatcagagcaaattccctcttttttttattcaaaatatttaatgcaatgaaaaattaaagcacgattccccatagggatatgtacataagggggatctgtagataataatgctgttcggacctggagtttccctatatacagattagggaaacatttattcttattctattttattatgccattcaaaatagtgggggggggggggaataccgatttaagagtcgttcactactgcaattcaaaaaaaaattatattaattatattatagttaatggttctaatttgttctgaattttgcagcctgcgactggaaatccactttttcttctttgtcatctcaatagaatagaaagaaacgggaagttttctagtgttagcaatgtgtgttttaagatagaatccatcgaggagaataagcgaaactggatccaaaaaagcagaaatcgattttttgaaaaagattcgaaaaaagaaagtaagtagaattagattcaagataaaagattaaaaggttttagtaattttagtaattagtaaaaaaatgtggatgaatacttgctcttttct

SEQ ID NO: 462637 - DNA, 677 bp, Sorghum bicolor
tcatcacatatgctgtgtttcattttgctaaatgatatcaattaaatggtatatcaattctataaattggatatagcaataaataaatcagcaaaattcttttattttagatagaagaaatgtttcttctatctaaaataaaagaatgtacccttctatccaaatccaatttgcatcgataaaataaatccaaattccagattccagcagtagatgaataattgcaaatttttgtgtgtacgagattagaataacttaaaaataactgacataattttttatttttcctgatcagaaaaatacatgaaaaagaaaggaggtagaaaaatttgttgatttatggttaaagaagaaaaacaagaaaacaggggttctgttgaatttcaagtattcagtttcaccaataagatacggagacttgcttcacatttagaattacacaaaaaagatttttcatcggaaagaggtctacgaagacttttgggaaaacgtcaacgtttgctggcttatttggcaaagaaaaatagagtacgttataagaaattaatcagtcagttggatattcgggagaagtaatttaatcgttcgaatttttttcctattttattagtagtcttatagtagtcttagattttgcattttgatgagccctcgtttgaggaattcatggaataatc

SEQ ID NO: 462638 - DNA, 680 bp, Sorghum bicolor
  unsure (1)..(680): unsure at all n locations
gtacagttgttcatcatctcattatattatcttgaatctacatagaatcgattagtagattgaaatagtgggctagtcagacttcttttttcactgcatccacttaatttcaatcaagtcaaaatcaaaaaaatcgaagataattcttcattgaaagaatccaaggagggggagaaaaataatacgagaatagactagaatagactatagtaaaagaaaaagggtggaaggaaaaaacctacgaatctttcatgcttaaaaaaggtgcgagatgcttcaatcgagatccttcaaaaaaaaaaaaaagaacataaaaaattttctaagaataagaaaatagtataaatggaaaatgtgcgatatgttgtgaatagcttcgtgtaagaaagtctaattttcttatgttctaattttcttatgtatagaactttctttttactcataatttctagtagaatagaaattatgagttactataatcgccctttctattatactggaatagaacatagtagaatagaacgactctttcttactttcttaaaagagtttcttacaagagtgaaacanaactaaagaaagaaaaaataaagtttggcaaaattattaatgcaaaacgatcaattaaagaaaagagttgatactacaattcgactactcaatcaattggtagtatccct

SEQ ID NO: 462639 - DNA, 537 bp, Sorghum bicolor
  unsure (1)..(537): unsure at all n locations
ccggatctatgcttattttcaactccccgaagcatttcgtcgcttgctacgcccttcctcgtctctgggtgcctaggtatccaccgcaagcctttcctcttttgaacctcgccattaacgttaaggctatgccatcctaaggtgctactaaatggaaggatcttatcaacgtccatgaatgcgaaatcatagatcgaactgacgaattggcaaccttcggtgctatcatagtatccgctaagttcacgggctggagataagcggactcgaaccgctgacatccgccacagggtaaaccaccgcctctcaggcctccccgacgggttctaccatagaggacaacgataggcaataactcccccccgaacacagcttacaactttcattcgnactgagctctccaaagagcaactcttctcaaaatcccaaaacaaaaggtgctgagttggaatcccattctaaggaaacctagaggttccggggaatccagctacaggagaaccaggaacggngagctctcccctttctccgcccgac

SEQ ID NO: 462640 - DNA, 632 bp, Sorghum bicolor
tagtaaatatgagaccatctgaatctgattctgttcccaatagccaggagatcgatcatccagatggtgatcctttggtcatacaggatgctcctattacactcgcattctctgaaggatgagaacccactatgtagcatctacatcgataattcaagcattggatacatcattagtccgattcttagcaggaactacccgtaataacgagcttgctaaatggatctgcctatcataaagagattcagtgttcctgaccctgcttcaccttaatggttatgtgcacaaatagatgcacaataaactcattgattacagttctgtcttggacggagtggcgatagcatctctcttctgcatgtctatggagtttggcaaaacgcaaacacctcacatagaggtaggaatttggcgaacgaaccacactccttcgtagacgttaggctcgaatctagagctgtttgtcggtccaatccagtttcaacaatgcacttctcggaccgagacagtggaactgcttggcgctgcatattataactcattaaagcccgattcgcatcattatgctcaataaaaggaatgcgagaacctccaatagaaaaatattggacagggaaaatacttttaacatg

SEQ ID NO: 462641 - DNA, 213 bp, Sorghum bicolor
gtacagtttgttcatcacacatcgttttaaacgaagttttaccataacattcctctaatttcattgcaaaatggtatcgagaattgatccaatatggatggaatcatgaatagtcattgcttttgtatactaattcaaacctgctatcctatggagaaaattggataaaagaaataagtatttatcggggaacactctgcaaagatacaattt

SEQ ID NO: 462642 - DNA, 628 bp, Sorghum bicolor
gtacagtagttcatcacaactcataattggtaaatttgcgggttcaattcctgctggatgcacgcgaacgggaacggtctattggaactggctctctatccatggaatctcatccatcatccatacataacgaattggtatggtatattcataccataacataagaacaataagaactcgaattcttatcgatactggaactcagagcataggagggaaagtcgatttatggatggaatcaaatacgcagtatttacagaaaagagtcttcgtttattgggaaagaatcaatatacttttaatgtcgaatcgggattcactaagacagaaataaagcattgggtcgaactcttctttggtgttaaggtagtagctgtgaatagccatcgactacccggaaagggtagaagaatgggacctattctgggacatacaatgcattacagacgtatgatcattacccttcaaccgggttattctattccacttctagatagagaaacgaactaaaggagaatacttaataatacggcgaaacatttatacaaaacacctatcccgagcacacgcaagggaaccgtagacaggcaagtgaaatccaatccacgaaataaattgatccatggac

SEQ ID NO: 462643 - DNA, 226 bp, Sorghum bicolor
catcaatgagaatatccttcctaaattctttatcttattaatcattaacttaggttttcccaagatcttggccgctattccaaatttaattattctactattccgaagacaatgaaaataagtaggaccaaaaaaattgtggggttctattgatgccttgaataacatgtaattttcctatagacaagaaacaaaaaagagaaaaaaggaattctgtttcgggacc

SEQ ID NO: 462644 - DNA, 287 bp, Sorghum bicolor
catatcctggaaaccaaccctctaaagcgaagataagcactaggaacgagcaataagccgtaccatcctacaaaaacaaaacggtccatgctgcaccagacgtccataatatcaaagaggatcgaccccttctttagtaactctaccaacggctatagccatagagatcctcctattcaaatacttcaaccattctcgagcacctcatatgacttccagggcatacgatagtttgattatctgtggacgatttcttactcaggtcaatgccctttttcagttcggct

SEQ ID NO: 462645 - DNA, 318 bp, Sorghum bicolor
gtacagttgttcatcattcattctcgattctacgagaatttttatgaaagcgtttcatttgcttctctgcaatggaagtttcattttcccagaatgtatcctaatttttggcctaattcttcttctgatgatcgatttaacctctgatcaaaaagatagaccttggttctatttcatctcttcaacaagtttagtaataagcataacggccctattgttccgatggagagaagaaccctaataattagcttttcgggaaatttccaaacgaacaatttcaaccgaaatctttcaatttcttattttattatgttcaac

SEQ ID NO: 462646 - DNA, 602 bp, Sorghum bicolor
gtacagtttttcatcagtttgatcctattcatggggattccgtaaatatcccattccaaaaatcgaaacaatcgggacttttcggagattggctgcagttactaattcatgatctggcatgtacagaatgaaaacttcattctcgattctacgagaatttttatgaaagcgtttcatttgcttctcttcaatggaagtttcattttcccagaatgtatcctaatttttggcctaattcttcttctgatgatcgatttaacctctgatcaaaaagatagaccttggttctatttcatctcttcaacaagtttagtaataagcataacggccctattgttccgatggagagaagaacctataattagcttttcgggaaatttccaaacgaacaatttcaacgaaatctttcaatttcttattttattatgttcaactttatgtattcctctatccgtagagtacattgaatgtacagaaatggctataacagagtttctgttattcgtattaacagctactctagggggaatgtttttatgtggtgctaacgatttaataactatctttgtagctccagaatgtttcagtttatggtcctacct

SEQ ID NO: 462647 - DNA, 626 bp, Sorghum bicolor
gtacagttgttcatcacaaagaaagatacttcttctggttctggatcaaaaattaataaaataaagaaatctttttttttttcaaattttaaaataaggaataaatcatgtatatatctaaacaaccttttcgtaaatctaagcaaccctttcgtaaatccaaacaaacttttcataaatctaagcaaccttttcgtaaattcaaacaaccttttcgtaaatccaaacaaccttttcgtaggcgttctcgaataggcccgggggatcgaattgattatagaaacatgagtttaattaatcgatttattagtgaacaaggaaaaatattatccagacgaataaatagattaaccttgaaacaacaacgattaattactgttgctataaaacaggctcgtattttatctttcttaccatttcgtaactatgagaatgagaagcaatttcaagcccaggcaatttcaataattactggtcctagacacagaaaaaatagacatattcctcaattaacacaaaagttcaattccaatcgaaacttaagaaactccaaccagaatttaagaaacaacaatcggaacttaagttccgattgttgatgttttattcgaaaggttcgactcata

SEQ ID NO: 462648 - DNA, 675 bp, Sorghum bicolor
catcactcgttgccgctagaaatgatcttgattttgctaaagaataagattgtactatggaaaaataagtcttttttttccaaagatttttacgaatacgcttttttgacatcgaagtacgtttttttggaactgccattcaaaaagggaattacttttttctagttgtatgtgaaagacatctattgccgcaaatcaatccttctttctgttttttcttagtatttatacttagatactgaaagatacttaaatgatactgaaagatacttaaattctaaattcttctttagttcattttgtctaatgtggataagacaagagttttttaagattttctatttaaatcaatttatatatcaaatatactccatatataaatatatggtatgggggataagccctcatataagaggggggcataaaaagaaggaaggtaaaattcaattcaaatagttaattaagttcagaaagctattgcataattgaattccaagtctcttaaacaagacattctaaaacttagagaattctagtcattaggatttccttttatatgaaataagcaatattcgagaatttcctataaatataggttttctttggaatccaatcaatcaattacgaaacaacagagctcttttattttaacagaaagaatacaaaatgattagt

SEQ ID NO: 462649 - DNA, 642 bp, Sorghum bicolor
  unsure (1)..(642): unsure at all n locations
gtacagttgttcatcagaagctattcaggaacagcttgaacggttttcccttcaggaacaaacataaatatagcatgtctactcttattagtataacttgtgttagtagaagaggaatcgttgagaaagatttttcgtttgaatcatgcaaatttttttttagtttttagtttagttatttaaagaatagatagaaaaaagattgcgtccaataggatttgaacctataccaaaggtttagaagacctctgtcctatccattagacaatggacgcttctctttcgtattttactctttctttattattattatttctcggaacaagagaaataataaaaaactgttagaccgaaactcttttaggaaagaaaaacaaatccatataccatatacaaatggatgatacatatatcataaagaaggaatatggagcaggtagtcagtatcgaacccgtaaccccaagcttatgagctttgtgagctaccaaactgctctaccttcttagcggngaactggtggataaaagggggttggataggcctctctaccatatctatacaaatagaatagtccacttatacagaatggtnaagagggctcttctacgatcatcaattcgagaaaaccattcaaatatgaa

SEQ ID NO: 462650 - DNA, 660 bp, Sorghum bicolor
  unsure (1)..(660): unsure at all n locations
gtacagtatttcatcaatctaataactttttctacccttctttcctttttctttgtatcaacgaaacctttggattgtcttcaattggatgggggaatccaattgacagcctcgactcgtatcctagctcgtctgagagctagcttcgcttcaaccaattctttcgtaccctcagctttactcaagttagcttcggctatttcaagtgcctgttgagcttcttctggatcaatgtcactacccagttctgcatcatttcctaaaatgatgatctcattattaactattctcgcaaaaccactccacagaaccgccgttaaccattggtcgttgaggaggcgtattctcaaaggacccatatctacagctgtgttaatgggggcgtggtttggtaatacaccaatttggccactattagtagataaaatgatttctttcacttcacaatcccaaataattcgtttaggagtcagtacataaagatttaatttcatttcttcaatttgctctcctcttctaagtttatagctttcgtgctagcttcatcgatgttccccactaaataaaaagcctgttcgggtaggccgtctaattctccggaaaggattagttganatcccctaattgtttctgcaagacaacatactttcctggagaacc

SEQ ID NO: 462651 - DNA, 630 bp, Sorghum bicolor
gtacagtagttcatcacttttattttcttttttcaaaagaaaaatggatttcattgaagtaataagactattccaattcgaataatagtggagaaagaatcgcaataaatgcaaagagggaacatcttgaatccggtattcaaggagttgaaccaggatttctaaatggataggatagggtatttctatatgtgatagataatgtaaatgcaaaaatttgtcttctaaaaagggaaatattgaatgaatagattgtaaattttgaaactttggtatttctttttcttctggacaagatagttgccctagcgagagtggaatttctacaacaatcccaaacccctcagatagaatctgagaataaaactcagaataaaaataattgcggtgatcaaacaatcgatcttggttaggataattaaccgaattaatccaaaaattctgctgatacattcgaataattaaacgtttcacaagtattgaactaaatttcttgttattacaaccaaaaatttccacgggttcggaaccatttaatccataatcatgagcaaatgcataaatattttcctgaaagagaagtgggtagacgaagtagtgttgacgagatttctgtttttctgaataccc

SEQ ID NO: 462652 - DNA, 651 bp, Sorghum bicolor
  unsure (1)..(651): unsure at all n locations
tcatcacagcatttctaaatggataggatagggtatttctatatgtgatagataatgtgggncagaaatttgtcttctaaaaagggaaatattgaatgaatagattgtaaattttgaaactttggtatttctttttcttctggacaagatagttgccctagcgagagtggaatttctacaacaatcccaaacccctcagatagaatctgggggggaaactcagaataaaaataattgcggtgatcaaacaatcgatcttggttaggataattaaccgaattaatccaaaaattctgctgatacattcgaataattaaacgtttcacaagtattgaactaaatttcttgttattacaaccaaaaatttccacgggttcggaaccatttaatccataatcatgagcaaatgcataaatatattcctgaaagagaagtgggtagacgaagtagtgttgacgagatttctgtttttctgaatacccttcgaatttttccatttgtatttctacttgaatcagagaaaaaagcatttctcgggttatcaaatgatgatacatagtgcaatatggtcagaacaaggtgttgcataatacaaacccaggaaagaaagggagtctaatccatagaactttttccgctccttttctatct

SEQ ID NO: 462653 - DNA, 655 bp, Sorghum bicolor
  unsure (1)..(655): unsure at all n locations
ataaaccccagtatagactggtacgatttatattcaacattttgttcattcgggtttgattgtgtcatagttctatagttggaatttggtttatcgttggatgaactgcattgctgatattgatcccaagaaaaaaaccgtgggtacagctaatccgtgaacagccagccatcgcactgtaaaaataggataggttcgatctatggtcattgggggcctcctaaaaggatctactaaattcatctagttgttctaaagaatcaaaacggtcggttattaatggaattccttgtcggctttccgtgaaatactcgtttggtcgaggacttccaaacacgtcataagctaaacccgtactgacaaataaccaacccgcaatgaatagggaaggtatagtaatgctatgaataacccagtatcgaatactggtaataatatcagcaaaagaacgttctcccgtgcttccagacatgctgagctcccaaaatttttattcaaaaaaggaattgattccgtaaaagatgggatccaccagtaaatagaaagttactgatatttcatcctcgtgagattgtcaattntgtaccaaaggtgtattttgagtataccgaattagtatagctatccttcctatggcacaacaatccaattttgc

SEQ ID NO: 462654 - DNA, 677 bp, Sorghum bicolor
gtacagtatttcatcatattttggtatcaatctgttaggaataggtttacatagttacggttcatttacattaccatctaaataattacataacataaaaccttcgggttttttccttttttgtttgatttgagaaccctttgaaaagacgttcaaggggttctcaaaaattcgagatagatctaattagacttttttacttttttcttaatttttaatttttccactctggaatatagagcggactggttaaaaaaagaaaattctatttagtataataattggataatagagcctctaccctatcaacggatagagagagaacaaaatctggataaataccaattcctattactggtaaaaagatacagattaaaagaaagagctcccgtggtccagaatctacaaaatttttgtttggaacatgaaatagcttgtatccatagaacatctggcgtaacatagataataaataaataggagttaatatcattcctattgccattacaaaagtaattagcatttttggcattaacataaatttaggactagtaattagtccaaaaaatactactaattctgcaacaaaaccgctcattcccggcaaggcaagagaagccattgaaaagctactaaacatggtaaaaatttttggcattgggatagatattcccccc

SEQ ID NO: 462655 - DNA, 125 bp, Sorghum bicolor
tcagagaaagaataggacagaacattgactttctattcaaaaaaataagttggatccacttacaggaatacaggactggctatagacggccacgcagatgcatgcatacaagcacaaagaaaata

SEQ ID NO: 462656 - DNA, 292 bp, Sorghum bicolor
  unsure (1)..(292): unsure at all n locations
agaaattggagggcctagcatatggtgatttctcttttgctaggcccagcgctgaaaaacctactttcttacgattacggggtttattcgaggatgaaatttcatcctgtaaccacagtatttctccctttttttctaccccaggctttgcaacatttcgaaatcgggaaattgcaacaggagcaggtgctatggggggggaattagcggatttagatttgcgaattattatagagaattctttggttgaatggaaggaattagaagacgaggggtatagnggagatgaatg

SEQ ID NO: 462657 - DNA, 482 bp, Sorghum bicolor
tcatcaagttacttttttggggttaaaccgcacccctgccattttctagttccaacttgggttgggtatgttcaatgaataattggaaagaatccacctcattctcactccatttgccgactccttcttttatggatttgctctcatctttagaccccaaaaagcgtatattgatagtaacctaataaaataaaaaccatgcaaacgctgggggggctaaattaaaatatgggatcctttttatttaagatcctcttttctccatctcatttctacttctactgcttattgggatgtctatgtgacccatagaaagttggtcatataatacatacataattgtatgtataactataagaaaaaggaagggaaattggataagataagaaagattttggattatacatatagaaaaacaaaggtagaaccgaacgaacaactcaacagaggcgggcccgaccccaacccacccaccgcccccg

SEQ ID NO: 462658 - DNA, 239 bp, Sorghum bicolor
  unsure (1)..(239): unsure at all n locations
caaaancgattcccgnagtagcggcgagcgaaatttgagcagcctaaaccgggggaggggggttgtgggagagcaatacaagcgttgtgctgctaggcgaagcggttgagtgccgcaccctagatggctaaagtccagtagccgaaagcatcactagcttacgctctgacccgagtagcatggggcacgttttatcccgggggggggggcaannaccacctttcaancctaaatactcc

SEQ ID NO: 462659 - DNA, 264 bp, Sorghum bicolor
  unsure (1)..(264): unsure at all n locations
ctaattcccactcacgacccatataacatgctacaccaagtaagaagtgtggagcaattagctcataaggaccgccattgtataaccattcatcaacagatgcagcttcccaaattgggtaaaaatgcaatccgatcgccgcagaagtaggaataatagcaccagagataatattgnttccattttttaaagaacgggggggaggctcacgaataccatcaatatctactggaggagcagcgatgaaggcgataataaatacgg

SEQ ID NO: 462660 - DNA, 404 bp, Sorghum bicolor
  unsure (1)..(404): unsure at all n locations
cagtttctggtgagagattcaaacaatttttagcaggcatctcttggaaaaactttcgagttcaaaactttttaatttttcttaaaaagttttggacggatttgttgaaacgattttcaacaggtaccccttggaaatggggtacttgactattctacaaggattctagtggatttggaacaaactatgttggagttttatcaacaattttattctaaaaaaaagttgggagtcgaatttatactgcagagtataaaaattatactactgcctgcccaacaaaaaataaaaagcatatcctacatacctaactcctncaggttcanggntttccgnttcccaacactangaaaagggaggattctagattttgatcctagggntaaaagggaggggacagatac

SEQ ID NO: 462661 - DNA, 449 bp, Sorghum bicolor
catcaatacctatttcaaagcctattttttaagggaaaacccctcttttctcattcgctctctattgcatgggtggaagaacaaaaatagaataggacttctgaaaaaaaaagaaagatattgaaaagaaaaattgacttttgaaaccctttattcattatgtgtaacggaaaagagttgcgatttcttcttattcctatagaacgtctagtaacaagaatatgaaatcgtaaatagcgaaaaaattcttgccttgcgcgatctaagtctaaggaaataaaaaaatgcgcttatacaccaatttcatccacatcgaatttatatatcagaatagcggatagaggtatcattcaaggggtcaggtctacttactttatctttctttccaattttattgtgggtttgataagaaccttttttgctttgtggataaaaaaagagtttttttt

SEQ ID NO: 462662 - DNA, 491 bp, Sorghum bicolor
ggtacagatctcacatggttctatttcatctcttcaacaagtttagtaataagcataacggccctattgtgtccgatggagagaagaacctataattagcttttcgggaaatttccaaacgaacaatttcaacgaaatctttcaatttcttattttattatgttcaactttatgtattcctctatccgtagagtacattgaatgtacagaaatggctataacagagtttctgttattcgtattaacagctactctagggggaatgtttttatgtggtgctaacgatttaataactatctttgtagctccagaatgtttcagtttatgttcctacctattgtctggatataccaagagagatctaccgcctcatgaggctactatgaaatatttactcatgggcggggcaagctctcccactccgccgcctggctgctcccggccctctgcgccccccctgccgggggggcccgccccccggcccccccccc

SEQ ID NO: 462663 - DNA, 367 bp, Sorghum bicolor
  unsure (1)..(367): unsure at all n locations
cagcgtctcgactcttgactatcaaagcattataaatataaggcaacttgcccgggggagaagtgatatccagcacgggtccaataatttgatcaatacgccctacgcttttttcttcaattgtggaaaccccgggacgcgaagtagtaggattggttctcataattatcacataattttcaaaaaaaggtttttatcgaggggggggttttcttgttgaataatgccaaatcaaatcaaaaaaaatatccaaaaatccaaaagtcaaaaggaaatgaattagttaattcaataaaaaagaaaaggggactcgcacttgatttcgttacccaagcgaatcccattcaatngnttacttatggaatga

SEQ ID NO: 462664 - DNA, 278 bp, Sorghum bicolor
  unsure (1)..(278): unsure at all n locations
ataatctaatacatagaaaagaagatatatatgcataatataataaagagaaaatgccaagagattggcattttcatttgatcattatatacatttttgagatattttgttttttttatttgttaataatttaaggataaatagttcactaaggagaagatagaatcatagcaaatgaaatttctaattcagcttagaaaggggagggaatatcaagcgttatagtatgatttggaatactctaaaaaaggaaggagggaggcggnagagagaaaaac

SEQ ID NO: 462665 - DNA, 227 bp, Sorghum bicolor
  unsure (1)..(227): unsure at all n locations
taaacgtattcgttcggttgcagatctgttacaagatcaattcggactggctgtgggccgtttacaacatgcggttcaaaaaactatccgtagagtattcatacgtcaatcgaaaccgactccacaaactttggtaactccaacttcaacttcgattttattaatcactacttatgagaccttttttgttttatacccgggggggggggnnnnnnatcaaaccaatc

SEQ ID NO: 462666 - DNA, 286 bp, Sorghum bicolor
ggtacagttgttcatcattttatggaataaaaaaaaattattatccatagaaataaaggataaagagaagcggggaaattgatttctaatccatatctctctgattctttatcttacaaagaaaagacaaagaaaagaacctttcttatggaaaggcggattatcctttatttttagggataaaaaatcgcaacatactagttatgccattctcactatggggggataggatatgcgggtatgtagtatatgattcgcctatctctcagagcgcgacagacggatc

SEQ ID NO: 462667 - DNA, 375 bp, Sorghum bicolor
  unsure (1)..(375): unsure at all n locations
cattgcctgatgttgaggcaatcaagaaagctgcataagtgaatatataacccacggaaaagtgggctaatccgaccaatcttgcttgcacaatggaaagagccacgggcttatctctccagcgaattaaattagccaaaggtgtgcgttcatgagcccatgctaaagtctcaattaattcctgccaatatccacgccaggaaattaagaacataaatcctgtagcccaaacaagatgtccaaataagaacatccaagcccatactgataaactattcatcccaaaaggattatatccattaataagntgtgaagagtttaaccataggtaatctcttaaccatnccatcaaataagtgggggattcattaaatt

SEQ ID NO: 462668 - DNA, 265 bp, Sorghum bicolor
  unsure (1)..(265): unsure at all n locations
tatttttcttaattttctcaagattttaaatctcgccataaaaaaacttcgagatcaagatatatagaaaagaaaatctctacatatctctatatatgtatatattatgtacattaatatatacatataatatgtacattatgcagtagacccataatggtaaatgaaagtggctaattattgaataaaaagcccttttaactgaggggtagagtaatgccacggnacggcataagccatcggctcacaggcgggcgcgggcccc

SEQ ID NO: 462669 - DNA, 245 bp, Sorghum bicolor
acaaggcattattctaccactaagtgaaaagccctttatcggatttgaaccgatgacttatgccttaccatggcattactctaccactgagttaaaagggctttttattcaataattagccactttcatttaccattatgggtctactgcataatgtacatattatatgtatatattaatgtacataatatatacatatatagagatatgtagagattttcttttctatatatcttgatctcgaa

SEQ ID NO: 462670 - DNA, 182 bp, Sorghum bicolor
tcatcaggctgtttttacataaataataagtaaaaaggcagtaggaactagaatgaacaatgctgtagcaataaatgcgagaatattgacttccataacctctttatttttttttttcacaataactcgggatgtaatcccatggagaggaaaaaggggtatcctgtaaattcaaggggagg

SEQ ID NO: 462671 - DNA, 409 bp, Sorghum bicolor
  unsure (1)..(409): unsure at all n locations
tcatcactcatagtaaactcttgcagcggaacgatagagactccatttcacttaggtggagttaggtgtaggccggaggcagacctaagtcaaggtaatcctcctttgaaacactttggtattgttcctagatagatcataagacaaataatcaatcagagcacagggagccatcttattatctttccctaaagaaaaactatggcggggggctgatctttacatcagttgatgaaagagcccaatgcagaaaaatgcatgttgggtctttgaaacagttcgaatcatttcgataataatccgtttgatctgttttaccgagaaggtctacggttcgaatccgtatagccctaatatatacgtctttttttncattttaggatggatatnttatgtttnctttagnata

SEQ ID NO: 462672 - DNA, 367 bp, Sorghum bicolor
  unsure (1)..(367): unsure at all n locations
ggtacagatctcatcaggcccattgttgtatccgattcaacattgatacatatttgttctcctcttaagagaaaagaggaacttccgttccgagctttggtttggtgagtcgtacgagatcatgtttacatacctatgaacttagcctcttcaaatgtatccgatatatataataatttttgggtgtgtcaactctctgttcatgtattttattatacggggggggtatatgtatttatttatataataataaatacctatactttgtgcaagtgataagagataatatgaaagattttcttatttttcttactcttgtaaggatcctaaatcctcgcatagaaaaactncgagaccaagacgtata

SEQ ID NO: 462673 - DNA, 492 bp, Sorghum bicolor
  unsure (1)..(492): unsure at all n locations
gtacagtagttcatcacacagggggtactgccgaccttatacgatccccctcgaatggaaaaatccaattcaatgaggatttggttcaccccacacgtacccgtcatgggcagcctgcttttctatgctatatagacttgcatgtaactattcagagtcaggatattctacatagtgtgaatattccgttaaaaagcttgattctagtgcaaaatgatcaatatgtagaatctgaacaagtaattgcggagattcgtgccggaacgtccactttgcattttaaagaaaaggtacaaaagcatatttattccgaatcagacggggaaatgcactggagtactgatgtttaccatgcgcccgaatatcaatatggtaatcttcntcgattaccaaaaacaagccatttatggatattgtcagtaagtatgtgcagatccaggatagcatcttttttactggacaaggatcaagatcaaatgaatacttattctt

SEQ ID NO: 462674 - DNA, 240 bp, Sorghum bicolor
  unsure (1)..(240): unsure at all n locations
tcatcaattcgaatttcccaaccaaaaattctatatgtctattctatgatatttctatatatatagaatatgatatctaatatgacacccgatttgtcaaagggattggattggtgacttacccattcagtgactttggcactggacgttccaaaaacgggtactatcggatcgggtgaattagagaatagacagaggtccgnnggcgggggagctnntctnctcctttcagggcctatc

SEQ ID NO: 462675 - DNA, 243 bp, Sorghum bicolor
  unsure (1)..(243): unsure at all n locations
acatctgcttctagntcgactntctctaatcgaattcgagctttttcgagttgggagggggccctctacgcaattcttccgaatttcgaatagtacttaagatcctctgttttcgattatctaataaatcttttaatgaaagtagattatcttgctattaagtttacaatttttatgatctcttcccgaaccaaacatgaagggggggttcatttnnctctcccnctccttttttttnttttt

SEQ ID NO: 462676 - DNA, 561 bp, Sorghum bicolor
cctcttggtcctgaatatcagaataggacgaacgaaccggcctccgcggatatctttgcttcggaacaaaacaattagcattaggctcggtcaactggaatgtgtattatccatatgggagatcttccaatcgagaagatccatcgatctgagacgaagagaaagggcccattttctttacttattcagttaaaccaaggattcgttatggaaacagatagcaacaaccatttcatcagacatgcgtatttttgattatccggtggatttacacagtttcattaatgcaaattgtttgatgtagttagtactcaggttattcgacgctcaagaattcttatttaggcagttcatatcatcccatacatagtgttttgatctaagattgcaattcttccatgtttccgcagtagcatattggtccatggagctagggtccaaaataggaatcaacaagtgtttccacgactctaccggccggccaatcctggtccactggatcccctccctttttcatgggcacatacctttccggctcaggagggggacatcttgtctccc

SEQ ID NO: 462677 - DNA, 318 bp, Sorghum bicolor
  unsure (1)..(318): unsure at all n locations
agcgctaaaaaacctactttcttacgatnacggggtttattcgaggatgaatggtgatgctgtaaccacagtatttctccctttttttctaccccaggctttgcaacatttcgaaatcgggaaattgcaacaggagcaggtgctattagagaacaattagcggatttagatttgcgaattattatagagaattctttggtgggggggaaggaattagaagacgaggggtataggcggacatgaatgggaagagagaaaaagacgactaggaccacccccccccggcggcccccccacccaccccccacagagggaccg

SEQ ID NO: 462678 - DNA, 363 bp, Sorghum bicolor
catcaaatataataaagagaaaatgccaagagattggcattttcatttgatcattatatacatttttgagatattttgttttttttatttgttaataatttaaggataaatagttcactaaggagaagatagaatcatagcaaatgaaatttctaattcagcttagaaaaaaagaatgaatatcaagcgttatagtatgatttggaatactctaaaaaaggaaggagggaggcgggagagagaaaaacttttggatatattcattccgattgaattgcaaatatataaacgataaaatcaattcaattctgaattgcaataagcgagcggggtgtctcaaataaagatgagttgctagactac

SEQ ID NO: 462679 - DNA, 353 bp, Sorghum bicolor
  unsure (1)..(353): unsure at all n locations
aaacacaaatttcatttatactcatgactcaagttgtctaattttgactgacaaacttcaaaagaaaaacccttcgaaattttttgagtcgtctctaaactcttttctttatctcatctcgaacaaattgacttttattccttattctgatctaattctattgttgagacggttgaaaatcgtgtttacttgttccggaatcctttatctttgatttgtgaaatccttgggtttagacattacttcgggaactcctattcttttttctttcaaaagagtagcaacataccctttcttttttcttatttncttngataaagcatttnactcttntatagaaatcaaatatgaac

SEQ ID NO: 462680 - DNA, 346 bp, Sorghum bicolor
  unsure (1)..(346): unsure at all n locations
actctgaatagntacatgcacgnctatatatctatagaaaagcaggctgggcctgggggggtacgtgtggngtgaaccaaatcctgattgaattggatttttccattcgagggggatcgtataaggtcggcagtaccccctgtgaatactccaccagtatgaaaagttcttaatgttagttgagtccctggctcccgagggggggggcccncaataatacctacagcttcccccaattcnaccanatccccatgagtggaactccncccataacataattgacagatccaagatgtgctccggcaagtaaagggggttctaatatactattggtgtgctcgaaacg

SEQ ID NO: 462681 - DNA, 386 bp, Sorghum bicolor
gtacagtttttcatcatttttgtccaaacactaattggtcgtgtattagcagacgatatatatatctgggtcacgatgcattgcttctcgaaatcaagatattggaattggattagtcaatcgattcataactgcctttcgagcacaaccgtttcgagcacaaccaatatatattagaaccccctttacttgccggagcacatcttggatctgtcaagagtggatgggcggagtcccactcatggggatctggtcgaattgggggaagctgtaggtattattgcgggtcaatcaattggggagccagggactcaactaacattaagaacttttcatactggtggggtattcacagggggtactgccgaccttatacgatccccctc

SEQ ID NO: 462682 - DNA, 427 bp, Sorghum bicolor
tcatcagttcggagccattccatttgaattggcactttctccatcatgactcatgggaagagacgtgggcaataattcaccttggacaatttatttgtgaaaatttatgtctatttaaatcacacataaaaaaatctggtcaaattttcattgttaatatggactcctttgttctaagagcagctaagccttatttgttcactataggagcggctgttcatggtcattatggaaaaatcctttacaaaggagataggttagttacgtttatatatgaaaaatcgagatccagtgatataacgcaaggtcttccaaaagtagaacaaatcttcgaagcgcgttcaattgattcactatcgccgaatctcgaaaggagaattgaggattggaatgaacgtataccaagacttcttgggggcccctgggg

SEQ ID NO: 462683 - DNA, 472 bp, Sorghum bicolor
tcatcatttgaatttgaataagaccactctccattttcataaaaagggtggaagatcaaatcaagaatttcattatatccctttcttctaccttcaattttatatcatatttcataaggataaacaatagggataggctctggaacagaagtaataaagtacataaaagtcggcaatctaaatattcctacctaatatatcaggacggtcttattaataattctaatgagttatcttggaatttggaatcgaatcaaaaaatctatattatgctcactcaaggaaagtagatgtagatagggacttataccctcagaaaaaaaatacactagcttcttaaattaaaacgtaaaaaaagatttttttgttatgtcgggaaataatttcccagaataaccaatgtccgttaggcacctaatccttatgtcataatagatccgaacacttgccttggattgactttcatatataa

SEQ ID NO: 462684 - DNA, 505 bp, Sorghum bicolor
  unsure (1)..(505): unsure at all n locations
catcactatttacattacagaatacagcgaaattcaaacagaattaaactaaaggataaacagagtaaaatctactaaagtaacacaaaaaatggagtaacacaaaaaatggaatttcatcaacatctggattttttgtatatatattatttatttttatgctttgtatctagcaaaattgtaaggtaaaacgacataatagaccctggattccccatttaattcggagaaaaaaagaaattcttgttcatggaacatcgatagaaaaaaaagccgactatcggatttgaaccgatgaccctcgcattacaaatgcgatgctctaacctctgagctaagtgggcttacataacagaaatagtgtaacaaataaaaatatatatagggaatctgtaaaatatcagatcttaattattaatcttagttattaactagttctaaattgggagttccacttanaanaaaaatactagattttattaagataaaggtaggttgatatgct

SEQ ID NO: 462685 - DNA, 101 bp, Sorghum bicolor
tcatcacaatttacagatcaaaatgaaaaaaaagaagcattgccttctttcttatatcgggggtggatcgtacttttgccctggggagtctctttctcttt

SEQ ID NO: 462686 - DNA, 270 bp, Sorghum bicolor
  unsure (1)..(270): unsure at all n locations
taaagcagaaaagtcaatagcaatactttcgaagttgcacgttttgtaataacaaccctttagagggcatagtaaggagagactgacatacgtaggatgaangtgttagatgtgactagaccggagacccttagccttgatcaaaaagaaaatatggactgtcgagctacatcgagtactattaactttactgacaaacaaccgagngaaaatatcggtggggacgaatagaacagaatatgccgggccaagagcatttgcattactatg

SEQ ID NO: 462687 - DNA, 377 bp, Sorghum bicolor
tcatcacgattcgatctggcgttaaataatcaagaatttccctatcttttttaccaaaagtatccaacagtctatggcttacttgatcattagccattgagaagtcaaagatatatcttccatcaacagaaaaagaataagtattcatttgatcttgatccttgtgcagtgaaaaagatgctatactggatctgcacatacttactgacagtatccataaatggcttgtttttggtaatcgacgaagattaccatattgatattcgggcgcatggtaaacatcagtactccagtgcatttccccgtctgattcggaataaatatgcttttgtaccttttctttaaaatgcaaagtggacgctccggcacgaatctcc

SEQ ID NO: 462688 - DNA, 411 bp, Sorghum bicolor
  unsure (1)..(411): unsure at all n locations
gtacagtttttcatcagaaaaagacttagatagactggattagaaggatccgttattcgaaaattcgaattcatttcttgtttcaaatattcacttgtagcataccatatctcaacggattggcgtaatttttctaccgcgtgtacagctccataataatagtgtttctccaaaagaaaactctgttgttccgcgtcttggactaaccatcctttagagggtattgttaaaagatcctcgattcctaaagaaatcgatgtagtagtggcttgatggaagcccagagtctttatttgatccagtatatgggaggtatatcccattccgaaatgatctattaatctgctaataagccgttccatagcagttccgnctatctntttactatgaaagacccaggtggcccgttct

SEQ ID NO: 462689 - DNA, 417 bp, Sorghum bicolor
tagcattaggctcggtcaactggaatgtgtattatccatatgggagatcttggcgatgcgagagagatccatcgatctgagacgaagagaaagggcccattttctttacttattcagttaaaccaaggattcgttatggaaacagatagcaacaaccatttcatcagacatgcgtatttttgattatccggtggatttacacagggggggggatgcaaattgtttgatgtagttagtactcaggttattcgacgctcaagaattcttatttaggcagttcatatcatcccatacatagtgttttgatctaagattgcaattcttccatgtttccgcagtagcatattgttccatggagctagggtccaaaataggaatcaacaagtgtttccacgactctaccgcccggccaatcct

SEQ ID NO: 462690 - DNA, 454 bp, Sorghum bicolor
  unsure (1)..(454): unsure at all n locations
gtacagttgttcatcaaataaagaataaagccaaaaaataagtcgaagatagaagagcccagattcaaaatgaagaaatggaaactcgaaaaggatccttctgattctcaaagaatgaggggcaaggggattgataccgagaaagatttcttcttattataagacgtgatttgatccgcatatgtttggtaaaagaacaatcttctcctttaatcataaatggaaagtgttcaattagaacatgaaaacgtgactcaattggtcttagttagtcttcgggacggagtggaagaagggcggagactcccgaacgaggaaaaggatcccttcgaaagaattgaacgaggagccgtatgaggtgaaaatctcatgtacggntctgtanagggacagnaaggangacntatctgncnactttnncactatcaaccccaaaaaacccanctctnnctta

SEQ ID NO: 462691 - DNA, 403 bp, Sorghum bicolor
cataacgtaggagacatccctattttcacccggggttcttaattaccactgcttagctttcaattcgcctctgaccatcaaattaaatgtgaataacccgtcctcctctctttgaaacaaggggcgcttccggttctgtgcgtgcttcaaacaattttgtcttctccatattaccatatctctagagtcaataattttctatgaggaactactgaactcaatcacttgctgcccgttactcaacagttttctgttgaggtctatcccgtagaggtagtcaaattggatcagtgatcgatttctaggtttcgtcgtaaacctaattggttacttccaattacgtaaatcaatagctcaaaccgcactcaaaggtagggcatttcccatggacatacgaacttct

SEQ ID NO: 462692 - DNA, 481 bp, Sorghum bicolor
gtacagttgttcatcatcgagaaaatgattcgaatttctgtctataatgcaaatagatagaaattcgattatgacttgcattaatttccttaaagaaaataaaaaacaaatttcatttatactcatgactcaagttggctaattttgactgacaaacttcaaaagaaaaacccttcgaaattttttgagtcgtctctaaactcttttctttatctcatctcgaacaaattgacttttattccttattctgatctaattctattgttgagacggttgaaaatcgtgtttacttgttccggaatcctttatctttgatttgtgaaatccttgggtttagacattacttcgggaactcctattcttttttctttcaaaagagtagcaacataccctttcttttttcttatttccttcgataaagcatttcactcttctatagaaatcaaatatgaacaattgattcagatagaccttttaatca

SEQ ID NO: 462693 - DNA, 517 bp, Sorghum bicolor
tacagtagttcatcatccgttattcgaaaattcgaattcatttcttgtttcaaatattcacttgtagcataccatatctcaacggattggcgtaatttttctaccgcgtgtacagctccataataatagtgtttctccaaaagaaaactctgttgttccgcgtcttggactaaccatcctttagagggtattgttaaaagatcctcgattcctaaagaaatcgatgtagtagtggcttgatggaagcccagagtctttatttgatccagtatatgggaggtatatcccattccgaaatgatctattaatctgctaataagccgtttcatagcagttccgtctatctctttattatgaaagaccaggttggcccgttctgccatacataagtacccccttttttggctgagtaggattcgacaattgctgagtaggattcgacaatgggcctgagtcagtgattcgaaaactttatttactcccctccctcaatctccatctggatctgcgcggccaa

SEQ ID NO: 462694 - DNA, 378 bp, Sorghum bicolor
  unsure (1)..(378): unsure at all n locations
atatatattggttcacgatgcattgcttctcgaaatcaagatattggaattgggttagggaatcgattcataactgcctttcgagcacaaccgtttcgagcacaaccaatatatattagaaccccctttacttgccggagcacatcttggatctgtcaattatgttatgggcggagtcccactcatggggatctggtcgagtggggggaagctntangtattattgcnnntcaatcaattnnnganccagngactcaactaacattaanaacttttcatactgnnggagtattcacagggggtactgccgaccttatacgatccccctcgaatggaaaaatccaattcaatgaggatttggctcaccccacacgtacc

SEQ ID NO: 462695 - DNA, 395 bp, Sorghum bicolor
  unsure (1)..(395): unsure at all n locations
ctaagatacagaactcgaaaaacgatttaagcacaataactacgccaagtactattttaacgcaaggctttgccacgtcgggtcttttaactgaaatgcatcaatccacaatactagtacctgctctacaatctcagtggttaatgatgcatgtcagtatgatgttactaagctatgcaactcttttgtgcggatccttattatccgccgctcttctaatcattagatttcgaaattctttcgatttcttttcactaaagaaaaatgtttttcttaaaacatttttctttagtgagattgaatatttatatgcaaaaagaagtgctttaaaaaacacctcttttcccgnatttccaaatcattacaaatctcaattaactgagcgtttggattct

SEQ ID NO: 462696 - DNA, 379 bp, Sorghum bicolor
  unsure (1)..(379): unsure at all n locations
taaaagatgattggttgaaaagaaagagaaatagaataatgagaatcatatggatttacacaaacctctaatgattagaaactaaaaacgagatctcgaagtaattcgaacgatttcgattatcatttatttgtacttattagttacttctacccgatagagcttagaagttggaagtaataatttcttggttgattgtatccttaaccatttcttttttttttgacacgaggaactcaccatgaatccactaattgctgctgcttccgttattgctgctggattggccgtagggcttgcttctattgggcccggagttggncaggggactgctgcaggacaggctgganaagggatggggagacagccagaagcagaa

SEQ ID NO: 462697 - DNA, 412 bp, Sorghum bicolor
  unsure (1)..(412): unsure at all n locations
tcatcaatccattgacacaaacggttcactgggcgaaaagtgagttgtttgggtcctggaggattgacggggagaactgcaagttttcgtagccgagatattcatccgagtcactatgggcgtatttgtccaattgacacgtccgaaggaatcaatgttggacttaccggatcgttagctattcatgcgagaattgatcactggtggggggctatagagagtccgttttatgaaatatnctgagaaagcaaaagaaaaaaaagagagacaggtagtttatttatcaccaaatagagatgaatattatatgatagcagcaggaaattctttgtccttgaatcagggtattcaggaagaacagggtgntccagctagataccggcaagaattcctgaccattgcctgggaacag

SEQ ID NO: 462698 - DNA, 324 bp, Sorghum bicolor
ctcaggcaaaagcgagcctgagactttcatctaacacagctacgatgtgatcaaggaaggacacacgccattcgttggttattagaagacactccctaagcgatcggtaagaacgatggcattcaaattaagaatggaattagaagatgcatgactagggcgtagcggtgccaggcacacaacggaagcgactgagagagagggagaggcaaatagagctctagccatgttccgtaagagctggacagaaaggatgagagataacaccaggagacatgcatcgtgaccaatagacatgaaatgaacagagaatggtgagacatt

SEQ ID NO: 462699 - DNA, 421 bp, Sorghum bicolor
  unsure (1)..(421): unsure at all n locations
ggtacagtttgttcatcaaaaataccaaaaagaagtagatcggttttttttcattcttcaagaactgcatatcttgccgagatcctcatccctaaaggtacttgacaatagtattattggagtcgatacacaactcacaaaaaatacaagaagtcgactaggtggattggtccgagtgaagagaaaaaaaagccatacagaactcaaaatcttttccggagatattcattttcctgaagaggcggataagatattaggtggcagtttgatacccccagaaagagaaaaaaaagattctaaggaatcaaaaaaaaggaaaaattgggtttatgttcaacggaaaaaaattctcaaaagcaaggaaaagtattttggttcggctngacctgcagcctcatacgaaatgccccacgggagaacc

SEQ ID NO: 462700 - DNA, 292 bp, Sorghum bicolor
  unsure (1)..(292): unsure at all n locations
gttaaggacctcagaagatagaggagagcgccaggcgcagatttccggaatacttctacggggaatgctcattcaatgagcattctccgtattatgccttgaagaggactcgaacctccacgctctttagcacgagattttgagtctcgcgtgtctaccatttcaccatcaaggcatcttgaaagtgaatcggggggggtgaatatgatatctatcgaatgtgatataatggaatatatgacaaagggggagtcttggagtctttngatcgatcgctcatatacatataggc

SEQ ID NO: 462701 - DNA, 483 bp, Sorghum bicolor
  unsure (1)..(483): unsure at all n locations
ttattggtctatagagaatcaaagtaaatttaccaatgaatctcgaaatgctgtgggtgggccatatgatttctgaagttattcagaagtaattcgtcgagatcgtgcaccttttcttatttatcaaaaaaaaatactaaaaatattctaaagtgcagccggatagatccaatctattcttgaaatagacaactcgcacacctgggggggcaaaaaaaatcaatacaccaaccactacagttagatttattagatttgttgctaaaatatcggtattaagcccgaaactcccagcgaatggccagtgagctaaaaaaacgaaagaatgggttacatttttcatatgctctcctcttatagataggacgaacaaagaagaaagtnnttcgatcacttacttcgctcgtncttttttgatcgggttttttaatgcaatttttttaatgcanatggattcaatctaataatttcttttagattaaa

SEQ ID NO: 462702 - DNA, 251 bp, Sorghum bicolor
  unsure (1)..(251): unsure at all n locations
actcttcgaactagatcaaagaaaagagtctttactacttttctgttatgctatggttgggggttgatggttaggttaattcacggatcatcccctaccttttaagctttttaaggttaaggaaattcgtttaaagggtatagaataagaatagactaataaaaaggaatctaaattagttcagtacaggtatttatttggggggggggggaggaaaaanantccaattncatttttttttncaattttaa

SEQ ID NO: 462703 - DNA, 420 bp, Sorghum bicolor
  unsure (1)..(420): unsure at all n locations
tccatatccaaataaaagcggtaaggaaattgttttaataaaaagaagaatcaatggattcatgattaaacccctcctacttcttgtattttcgtacaattttgattaagtgagggatcaaatagaaatatgtagtcaactttatttgaaggtagtttggaggatcataaatatgactattgctttccaattagctggttttgcattaattgcgacttcctcagttttagtaattagtgtaccccttgtatttgcttctcctgatggttggtcaaataataaaaacgttgtattttccggtacatcattatggattggattagtctttctggtagctattctgaattcttttatttcttgaatttggttagtatttagtaacccggttcaaantanataaaaagaaaggccctttttttg

SEQ ID NO: 462704 - DNA, 437 bp, Sorghum bicolor
catcaattccccttcttttatgctatgcacaacaaaatataatagtaattaatcctataaatctacgcaggtgctcaagaattaactattcttcttaatcaacgatttcttatatagagagaacggccctcagaaattgcaaatactaatttgttaagaattaatcgaattgaagtcatagtgtcatcgttggcaggaatcgatatattggcgggatctgggtcacaatttgtatcgactaaagaaatagtaggaatccccaaaatggcacattcccgaagagctatatactctttttgctgatcaaggacgatcacaatgtcaggcaacctcgtcatatatttgatcccgccgagatatctttgcaaggtagataattttctctttaagattgccgcatctctttttgggagatggtggaattttcccattttttc

SEQ ID NO: 462705 - DNA, 395 bp, Sorghum bicolor
tcatcactcatagtaaactcttgcagcggaacgatagagactccatttcacttaggtggattagtgtaggccggaggcagacctaagtcaaggtaatcctcctttgaaacactttggtattgttcctagatagatcataagacaaataatcaatcagagcacagggagccatcttattatctttccctaaagaaaaactatggcgaatggggtgatctttacatcagttgatgaaagagcccaatgcagaaaaatgcatgttgggtctttgaaacagttcgaatcatttcgataataatccgtttgatctgttttaccgagaaggtctacggttcgaatccgtatagccctaatatatacgtctttttttccattttaggatggatatcttatgt

SEQ ID NO: 462706 - DNA, 508 bp, Sorghum bicolor
  unsure (1)..(508): unsure at all n locations
gttccggcacgaatctccgcaattacttgttcagattctacatattgatcattttgcactagaatcaagctttttaacggaatattcacactatgtagaatatcctgactctgaatagttacatgcaagtctatatagcatagaaaagcaggctgcccatgacgggtacgtgtggggtgaaccaaatcctcattgaattggatttttccattcgagggggatcgtataaggtcggcagtaccccctgtgaatactccaccagtatgaaaagttcttaatgttagttgagtccctggctccccaattgattgacccgcaataatacctacagcttcccccaattcgaccagatccccatgagtgggactccgcccataacataattgacagatccaagatgtgctccggcaaggaaagggggttctaatatatattgggtgtgctcgaaacggttgtgctcgaaagggaattatgaatcgattgactaatccaattccaatatnttgat

SEQ ID NO: 462707 - DNA, 571 bp, Sorghum bicolor
  unsure (1)..(571): unsure at all n locations
catgttctgaattttgcagcctgcgactggaaatccactttttcttctttgtgtggcaagannaatagaaagaaacgggaagttttctagtgttagcaatgtgtgttttaagatagaatccatcgaggagaataagcgaaactggatccaaaaaagcagaaatcgattttttgaaaaagattcgaaaaaagaaagtaagtagagggggagggaagataaaagaaaaaaaggttttagtaattttagtaattagtaaaaaaatgtggatgaatacttgctcttttctcgattttagatcggattttttggcggcatggccaagtggtaaggcaggggactgcaaatcctttacccccagttcaaatctgggtgccgcctgatcaataaaatacttaggattatagtactgatcaaactcgacaaattcgtacccccctaagttgnggcacgagagtaactaggtttggcgatactggattttgagaatccataccatagttctaccctcaaactagggtttgttttgggggcagtggcccaaacggttaccaatagggatgaagtagcgttt

SEQ ID NO: 462708 - DNA, 563 bp, Sorghum bicolor
  unsure (1)..(563): unsure at all n locations
atggatctcttcccggggataccccccatatngaaccttcttctcctgagggtgtggatttcggattaaaaagatgggaaagcgcctttctctctataagaacagtgcgttctgaggtgtgaagtgggagagaggggatgattgaggttttgaataagacgacctttgcgttttggatttggatctttttcggatggggagaggggggaaaaagtaaaataaaaagtgttaagctttttatcattctggcatcgagctattttgccgcaggacctcccctacagtatcgtcaccgcagtagagtttaaccaccaaattcgggatggattggtgtggttcctctacgcctaggacaccagaatatcgaaccatgaacgagaaaaggcatgagagaaatattggctagtaattgngaaaccccaattcttaactggaagggacaccaaaggactctgcccttcctcctatttatccaagaganggaaggccagagctttnttttcgtcacnccaatcctcttttcatcaaagaacggaccatgaaaacagacggnagncccttac

SEQ ID NO: 462709 - DNA, 641 bp, Sorghum bicolor
  unsure (1)..(641): unsure at all n locations
acacatttgcctctttcttagtcctatttttttttgctcatgggtatgtgccaatccaacaaaagtccctattttatttcctttttctatctaattacattgtatttccattgacaaaggtctattgaacaaatagaatttgtagatagatgggtctctttattgtcactccatattatttttttctggctggggttgggtcaaatgatatggttgcccctcttacatgtactctcatacaagattattttacttctttaaataaaaattgccaaaaaaatcacaattttgccattgtgattggggctgctcttagccttagtgaaattgaaccggatctgttcattttggtatttgagtgtttttaatggattagaaaatctttcttttgatgtcttgctaattcaatgttttgacaggagcgtccggtgtaatttcatcgatttttagattttgatcctatctaagagatcctattttatctgggttgctaactcaatggnagagtactcggcttttaagtcccgctatgatcctttacacattnggatcaaacaacaaattcctncagacttttggcagaatctagaagacacgactgaccttaaagggaatgaatggaaaaatagcatcgcccataa

SEQ ID NO: 462710 - DNA, 581 bp, Sorghum bicolor
attattcgtcaatcccacttcaattacctaaaaaatgagggatattttcttgctaggattcgagacatgcagataatatagaatccaaaaaatgcattgatcattacatagaattctattaagatattatatgaaagtcgaatttcttccattctcatttgagaatgcgaatacaaggaggtattttgtgtttgggaaagtccgaagaaaaaaggatttggaatctaccttttcttttgctttttcccttagaaaaataactcaatcaaaatccaattatctactctacaagaatgaaatgcttgttatgcctaatatacttagtttaacctgtatctgttttaattctgttctttgtccgactagctttttcttcgccaaattacccgaagcttatgccattttcaacccaatcgtggatgttatgcctgtcatacctgtactcttttttctattagcgtttgtttggcaagctgctgtaagttttcgatgaaatctttactattctgcctgccaaattgaatgatgtattcattccaaaaaaaaaaatggataagagctgagaagtcttatattatgaa

SEQ ID NO: 462711 - DNA, 544 bp, Sorghum bicolor
agctcgactgcaagtatgttcatcactggataaaacgtcgcatcttccttcaattccttgtgcgggatatccaatcaattagaattcaggttaaagagggtctttatcctcgtcgtatcctttatatggaaatccggggccagggggtcattcccttgactcgtactgatgagaagttttttactccacgagaaattgaacaaaaagctgccgaattggcctatttcttgggtgtaccaattgaagtattttgagtaccaattgcaattttttgcaattgtaaggggattttcgagtatttatctaaaggaaggaacaaacgaggataagagaaaattgcttcgaatttgttttgtccaagtgagatatatggcatactattcttccatttttatataaaaggccttttttttatttctctattccactccatttagatctaagaaagaacccaatacaatgaaattccactagtatacaaaaagagaaatagatacaaacacaaggtctcaaaccttgttatagaattttttgttcaaagaaa

SEQ ID NO: 462712 - DNA, 500 bp, Sorghum bicolor
gcaagttgttcatcactcattcaatgagcattctccgtattatgccttgaagaggactcgaacctccacgctctttagcacgagattttgagtctcgcgtgtctaccatttcaccatcaaggcatcttgaaagtgaatcgtattccatgaatatgatatctatcgaatgtgatatatggaatatatgacaaaggtggagtcttggagtatttcgatcgatcgctcatatacatataggcctgagtcagacatcaaatagcttcgatttgcattatccgtaggacaccttatatgtatcaaaatcgatatcaaaatcaaaaagatgtacaatccaatttctcgattcaatagaagcccaaagaggtgcatatggtacccaacaaataaggataggatagatatgtcaaaagcaggtctgattacacctattcctaatcctaaatagaatgtaaggacgtagggatttctatgtaaacagagtatcctatttccataggctc

SEQ ID NO: 462713 - DNA, 603 bp, Sorghum bicolor
tcatcatatctattttggccaattgtattatttccttgtgtattcctataggaagttggtggcgtgtgtcttcggtttctcttttatcatttcgtccaagagaaaaagttcttctaattctatgaatccttctagaatccttttctcttgaatatcagttaagaaagtttcggattgcctggtattccaccaattcttaatccaaaggggcggacatttgttaaaagagaaagagactccccagggcaaaagtacgataaatacaagatataagaaagaaggcaatgctttcttttttttcatttttgatctgtaaattgagttgttaatgaatctgcttcattcgccgactctatttcatttgctgaatatatatgatatttcttttctttgaagcaaaaattctataacaaggtttgagaccttgtgtttgtatctatttctctttttgtatactagtggaatttcattgtattgggttctttcttagatctaaatggagtggaatagagaaataaaaaaaaggccttttatataaaaatggaagaatagtatgccatatatctcacttggaccaaacaaattcgaagcaattttctctta

SEQ ID NO: 462714 - DNA, 510 bp, Sorghum bicolor
tcatcaatacgatagagataaaaacattaccataggctcattcatcgaaaatcagagagagaggaaaagaaaaaagaattttgatcaaatcaatagaaggaaggatcccttacctgatttgaatttcatcctccttcaaataggatatgctctaagtctccctatactttcctataatgactgcaacgattttatccattttgcgaattcctattttgtttgaagtatattactatcatatacattatctaaatttacattatataaatcgatccactttaaataaaatagaaaaaatcaaaagaaaaaaagaaagagtaaataataaaacaggatattctgtttcataattctgaaatagagttcttttttttagtattactcctcattaggatgtatatattaatcatccgatttttattatgttctaatctaattagtagtaaagattttcttttttatttaataatctctgactatcattaaataaaaggtagagcttttcttttt

SEQ ID NO: 462715 - DNA, 625 bp, Sorghum bicolor
  unsure (1)..(625): unsure at all n locations
tcatcataacgtatactttattgtgaccatccctcatcggttgcccgcgggacccactgtgganaggtgtatccacggcttcttgtaccaatttttcctggcacattactaaatctgctggtgctaattcacttctttttaatagataggcaaggttgttgttccggcggataactctcttataaagttcattaatattttaagtcactggtgggtccccagatctataaacaatgggtctcaattcgggaggaagaaccggtaataagcacaaaaccatccattctggttctacatttgtttgaataaaatgtttcgccaattgcatgcgtctaatcaaaaaaacttttcttattcgtctttttctatcttcccattcatctccactatacccctcgtcttctaattccttccattcaaccaaagaattctctataataattcgcaaatctaaatcccctaattgttctctaatagcacctgctcctgttgcaatttcccgatttccaaatgttgcaaagcctggggtagaaaaaaagggagaaatactgtggttacaggatgaaatttcatcctcgaataaaccccgtaatcgtaagaaagtaggttttttagcgctgggcct

SEQ ID NO: 462716 - DNA, 654 bp, Sorghum bicolor
tcatcagaccctaaggaattcattataggaatgtttccaatagaaatggtttgctttgggcatggaaaccaaaaattaatctcgcggatacatataattcggaagaataggtgagtgattcatacacagcattcctttcttttatcgagggttctagcaattgatatcctttcgcaaataattgaaatgcaatttcttgatctggagggggggttgtgggaaacttctcaagttcttccgccaatccttgattaatgaatctacaaaatccctcgaattggatctgactaaatccgggtattgtggacattccctcatttccattccggagcatttgaatcttaagtttcctatttatagaagaaaaattccattatcagctcactcttcatcaatccctacggatcaatctagcaatcatggaatccatattctgtttactgaatcacatgaaattctagggaactccacatacgtatttcatatatgtatttcatacatatgaatagagacgatttcgaccaaagttcgaatttcgcaggggtcgaaatggaataaaaatgaattgataaaacagtcctagaaaaaaattatgccacttaaactttatgatattctaaaaagattggatagcaaagatttctcgttttatct

SEQ ID NO: 462717 - DNA, 586 bp, Sorghum bicolor
ggctgatcataaacaatttttggattttggataagacctccttactctttcatagaaagatagaaagcggggcagcagtagggtttaggtcaaaaataaaaataaacatgggtaagttaggtatccaataaatatttatttatcctaattttatggtatattcttacgtcctttgcttataaaaaaggtaacaaacgaaagaaaaaatctctctattcccgcgtcttctattcagagcatcccctactcttttttagggaaagagcgatgtatcatatttctacttaatgctctccaattctaccagaaatcatataagaatttgttaggagtaaattcctttaacgggttcatccatagtcttagggcagaatagaatggccttttgactctgtacccttgattccactatgattattgatcaatagtagaagaattctttcatagaaataggagacataatttacatggatatagtaagtctcgcttgggctgctttaatggtagtctttacattttctttttcgctaggagtatgggggaggagtggactctagggatactaccaattgattgagtaagcgaa

SEQ ID NO: 462718 - DNA, 545 bp, Sorghum bicolor
atgaattttgatttcattcggctcctttatggatattctcaccacttaacatgtatgtcagcttttctgtctgaatggaaccaaagctctctgctttctagatgatccttatagagtaggagatagaaattctcctaaatatctatctaatctacttacttcgttccctaatttcattcaagagatcctgaggaaaagagttgggtttccaccgagctgaaacaatataatatactgatggttctagtaaaccaaaaccatcgttttttagctattgggcttccatttcctacaaaacaaaagaagatttagttacgattggaaataaacttttttgtatcttcatccatagatcctttactcatatttattcaatcggaatacttatcggaatacttaatccaatgcaaaattttgcttcgcgactacgtactcataatcgaatttgtattttagatgcaaattcaattagtctttggatactaatcgcgagaatgtatattcttcctcaatatgctattgagaggaaaaggattaaacccttt

SEQ ID NO: 462719 - DNA, 611 bp, Sorghum bicolor
catcaaattaataagctgttttgtttcactcatatagctatcgagtttaacttaccaacgcgaatacagaataagcaaaggaagataagcattcaatgtattttagaggaaaaagatcctattttaacgaatcacacgtagagatattgctagtacacaaaaagttaatggtatttcataactaatagattgagcagccgctcgtagaccgcctgaaaaagaatatttattatttgagctatatcctgccatgagaagaccaataggagcaatacttgaaatcgcaatccataaaaaaacaccaatactaagatcagctaaaacaaaacgatatcccaaagggataactaaaaaacttaataaaacggatatgactgctatagagggaccaatgctaaataaaggaatctctcctcgggatgggaggatatcctcttttaaaagtagcttagttccatctgctatagcttgaagcagtcccagggggccagcatattcaggaccaatacgttgttgtatcgatgcggatatttctctttctaaccacacaattacgagtacttctattgtgattcccagtaggagggccaaaatgggtagaatccatataa

SEQ ID NO: 462720 - DNA, 599 bp, Sorghum bicolor
tcatcaattggtagtatccctagagtccactcctccccctactactagcgaaagagaaaatgtaaagactaccattaaagcagcccaagcgagacttactatatccatgtaaattatgtctcctatttctatgaaagaattcttctactattgatcaataatcatagtggaatcaagggtacagagtcaaaaggccattctattctgccctaagactatggatgaacccgttaaaggaatttactcctaacaaattcttatatgatttctggtagaattggagagcattaagtagaaatatgatacatcgctctttccctaaaaaagagtaggggatgctctgaatagaagacgcgggaatagagagattttttctttcgtttgttaccttttttataagcaaaggacgtaagaatataccataaaattaggataaataaatatttattggatacctaacttacccatgtttatttttatttttgacctaaaccctactgctgccccgctttctatctttctatgaaagagtaaggaggtcttatccacaatccaaaaattgattttttgatcagcctattcaatctaattctcgacag

SEQ ID NO: 462721 - DNA, 631 bp, Sorghum bicolor
tcaatacgtttaattattcctacaatatatactaagagatataaaggcagtacaatcccctgggtttcttccttttcttttttgttcagaattgaacaaagaaattgggaaagatgttttcttcctccacgtatcatgaagtgcgagccatagggaaggagtgagatgactttcacaaatttatcatagacttcgtctatcgcttgagagaggcaacaaagagtaataacttaaaaagaaaaacagatacgaatcgacagatttacctgatgaaaattgacatcagaggactctgatgaggattcctcaaactcttcataaagaggatccagaaagtctctggttagtcgagaccctccatttcctaatttcctctcttcttttccgctcaattctagtttattagattcttgtttaaaagaatcaaagaagatgaatagaactaagaacacataaaaaagagcatagagaaccattaccaaacgttcctcctaagaatcatattgggtatctgtccccttccttttaaccctaggatcaaaatctagaatcctcccttttcctagggttcggaaacggaaaaccctgaacctggaggagttaggtatgtaggatatgctttttatttttt

SEQ ID NO: 462722 - DNA, 589 bp, Sorghum bicolor
gagtcattgtatttttctgttcatacgaaggaaacaaatatgtgattttgggagtgggaaaatcgaaatgaagccctttttgttcagtctatctggacctttttgtataataggaattaattagaatattatattctaagtatttcgtttcgtctaggaacagaacctcaaaatattcctttactttaataaaatctgggggggggttgtataagtgaacatgaatttattatcactcaatgagcatcttgtatttcatagaaattgggggttatatagtccttacgtaagggccagcctatccaactttcaggcattaagatacgtttaagacgtggatgattatcataagaaattcccaccatatcataagattcgcgttcttgaaaatcggcacttctccaaacccagaaaacagacgggattctaggattatccttttgggcaaagacttttatgcatacctcttctgggttatctataccatactggattctcgtaagatgatacacgctagctaaagatccaccgggtgctacgtcataagcacattgggaacgtaaataattgtaacatatacatataaaat

SEQ ID NO: 462723 - DNA, 448 bp, Sorghum bicolor
ctctagaattatgagtaaaaagaaagttctatacataagaaagggggaagctaagaaaattagactttcttacacgaagctattcacaacatatcgcacattttccatttatactattttcttattcttagaaaattttttatgttcttttttttttttttgaaggatctcgattgaagcatttctcaccttttgggggcatgaaagattcgtatgttttttccttttactttttttcttttactatagtctattctagtctattctcgtattatttttctccccctccttggattctttcaatgaagaattatcttcgatttttttgattttgacttgattgaaattaagtggatgcagtgaaaaaagaagttgaattagactactatttcaatctactaatcgattctatgtagattcaagataatataatagaaagaatctaaag

SEQ ID NO: 462724 - DNA, 478 bp, Sorghum bicolor
tctgtatggagaacaaatatctctccgttccgacgcgaatagatttttttttttaatttcgaaataaaggttcttgtcttgtggggaacgatgcacaaatttttggaatccggtaccaacaggtataatcccccccagaactacgttttctttcaggcctttcaaccaatcaatacgacctcgtagggcagcttttgctaaaactcgagcagtttcttgaaaacttgcttcagatatgaaactttgggtattcagggaagcccttgttattcccaataagattgcccgataatagatcgattcatctaaagcccgccctgctcgttccgctcgcaatagtcctattaattccccaggtaaaaaaacattagacattccatcttcggaaacccttacttttgatgttacttggcgtataataatctctatatgtctattatggatctggaacccttgggatcgataaaccttttggatc

SEQ ID NO: 462725 - DNA, 578 bp, Sorghum bicolor
  unsure (1)..(578): unsure at all n locations
cgctgcagttgtcatcaggaaagtcgacagtaagtcatccttactgccctctacagaaccgtcatgagatttcacctcatacggctcctcgtcaattctttcgaagggntccttttcctcgttcgggagtctccgcccttcttccactccgtcccgaagactaactaagaccaattgagtcacgttttcatgttctaattgaacactttccatttatgattaaaggagaagattgttcttttaccaaacatatgcggatcaaatcacgtcttataataagaagaaatctttctcggtatcaatccccttgcccctcattctttgagaatcagaaggatccttttcgagtttccatttcttcattttgaatctgggctcttctatcttcgacttatttttttggctttattctttatttatttcatttcgatttttccctcttcctctatccctatcctctaggtacagcgtttgcatcaatagagaactttttcctctgtatgaatcgatattattccattccaatttcttcccgaaacttcccaagaaaaatcccgaattggatccaaaattgacgg

SEQ ID NO: 462726 - DNA, 435 bp, Sorghum bicolor
ctatacgaagatactatttgcagatccaacccaagggatggtgatcggactgaatgaactaacgataggagacagtcgcggaatgtgagctaatagatataataggtgctgaaactctctaaataaaggaatcagctacaataggggcaatagttataaatatacaaaagatagataacgctatatatctagatgatatgatgcactgggagcttatagtaagaatcgagtcggattagacagacccttgtggatccggtggaaactagctcaacgcctggttgggataagagacgttccgattgaaggtcaatatgaatctttcgagactgatcatgagatttatccccactatctactagtgtgaagtagaaaagatgaactccggcctatataccttgaaacgactggaggtatatttatttttatagagaa

SEQ ID NO: 462727 - DNA, 596 bp, Sorghum bicolor
  unsure (1)..(596): unsure at all n locations
attcaatttttatcagaggacaatatttttattacaccatnttccatgaagggcgtcaaagaattatatnatatatcgggtgtagaagtaggccaacacttctattggcaaatagggggtttccaaattcatgcccaagtactcatcacttcttggttcgtaattactattttgctaggttcatttttcatagcgtgggggggaatccacaaaccatcccnaccnatantcaaaatttcttcnaatatgtccttnantttattcnaaacttnancaaaactcaaattnnanaanaatatnntccctnnnttccctttattgnaactatnttcctttttatttttntttccaattnntcaaaccctcttttaccttnnaaaattataaaattaccccatnnnnaattancancncccacnaattaaataaatactacttttncctttaactttactaacaatcaccncatatttttatncnnntcttaacaaaaaaanattnaattatttcnaaaaattattaaaccaaccccaaccttttacctattaacatcctaaaaaattcacaaaaccnntatcacttaanttttcactttt

SEQ ID NO: 462728 - DNA, 610 bp, Sorghum bicolor
gcagctgttctcatgaccttggttatcaaaggattgaacaaccgagatccatttacttatgatacctggggggcattgctaacaaggatctaatgaattatgagtttaatagatcctctttagcagaaagacgtatattccttgctcattatcagacaatcacttattcccaaacctcgtgtggggctaatcgttttcatttaccatctcatggggggggcttttcgttccgcttagccctatcgggtattttagtgataggttctataggaactggacgatcctatttggtcaaatacctaacgaaaaattcctattttcctttcattaaggtacgagggcttcttattccacaagaacgaaagcaccttttcattctttcatatactaggggtttttacttggaaaagacaatgttccatactaaaggattcgggtccataaccacgagttccagtgcactagatcttgtagcacttagcaacgaggccctatccattagtattccacataagaaatccattatagaaactaatacaattagattagctcttcatagacaaacttggggtttgcgagccaagataagaccggctcgggatcatgggac

SEQ ID NO: 462729 - DNA, 601 bp, Sorghum bicolor
  unsure (1)..(601): unsure at all n locations
tccttgtttagatagtgtatgaatagtctcgactaaatccttgtatgggtgcgtgtatttctctataaaaagaaatatgaccaagagtggttcgaatgtatatagaacggatttctttttttctatttcccactactagatagtgggcataaatctcatgataagtcccaaaagattcatattttttttcaatcgggggggtgtcttgacccaacgatgcgttgatctagtttccatcggagccacaagggactgtttaaaccgattcgtttctgtctataagctcccagtgcatcataggaactagaaaaatggggttctttatctttcgtatacttataataattgttattattgtagttgatttttttatttggagagtttccgcaactattatatntatttgcacaaatacctcgacggtttccaatcgttaatacataaagnccgataagcatgtcttgggttggcacgcaaataggatctccaatagcgggagacaggagattcatatgagaaaacataagtaaacgggctttcgcctgagcttccaaggataaggtaggttaacagccatttcatccccataaagtccgattga

SEQ ID NO: 462730 - DNA, 659 bp, Sorghum bicolor
tttgtataagaattaggtctatatcatatctaaatagaaaggaaatcaaaaagaagggcagtaggggattacattaggatgaatccttaaggaagacatatcacaaaagaaacaaagcctaaagtaagcgctccttgcctttggtttgagcaaaacagattcttgtttcaccgaggaaaagagagaagttctggataaattgacaatgtcaacttgaattgactaattcagttccgcctattccacattaatgggagtacatttatgtttctgcttcacgaatatgatattttttggacatttctaataatagcaagccttattcctattttggtattttggatttcaggacttttagccccggttagtgaaggaccagagaagctttctagttatgaatcgggtatagaacccatggggggggcttggttacaattccgaatacgctattacatgtttgcgctagtttttgttgtttttgatgtggaaacagtctttctctacccttgggcaatgagtttcgacgtattgggtgtatccgtttttatcgaagctttcatttttgtgcttatcctagttgttggtttagtttatgcatggcgaaaaggagccttggaatggtcttaactgaatattcagaaaaaaaaaaaagaaggaaa

SEQ ID NO: 462731 - DNA, 645 bp, Sorghum bicolor
  unsure (1)..(645): unsure at all n locations
ctaaataaaaatgggatcctttttatttaagatcctcttttctccatctcatttctacttctactgcttattgggatgtctatgtgacccatagaaagttggtcatataatacatacataattgtatgtataactataagaaaaaggaagggaaattggataagataagaaagattttggattatacatatagaaaaacaaaagtagaaaagaatgaaaaatagaatagagggggtttcgaatccaatcaaaaaacccattttggtcttagtatggataagagatcttcctatgttatattattccactatcaaccatgaattgatttgatagatccaatattcataatattgaattgattcagtattatcagaatgcaagtcctccccttgaatttacaggatacccctttttcctctccatgggattacatcccgagttattgngaaaaaaaaaaataaagaggttatggaagtcaatattctcgcatttattgctacagcattgttcattctagttcctactgcctttttacttattatttaatgaaaaacagccagtcaaaaagattaattggaattcccaataatcattgaagaaatgaaaaagggattaaagaaaataaaaaatccaagtcttaaatga

SEQ ID NO: 462732 - DNA, 595 bp, Sorghum bicolor
gcaagttgttcatcataacactgaagcagctactttcgaagtaacagaaagaaaagcaacgactggagtgggggagtcagagtcgaaaagaggattcctcgcttctttctctcatgcaaaaccgtgcatgagactttcatctcgcacggctcctaagtgataaaagaaagaagaactcgtcttctttcttttttgattaccttcctcgcgtatgtataagaccgaatccattctttttcgaaatggatttcgaaaaagaactactaatccttaacttttcgaggaatccttcatcagtggttgtgaatgactgactttttcaatcctttcgaccttggttccgtaggagcaagtcagaaaggttgagaaatagaaccatctgatttgattcgttcccaatagccatgagatgatcatcttagggtgatccttttgtcaacggatgctcctattacactcgtagtctctgaaggatgagaacccactatgtagcatttacatcgataattcaagcattgtatacgtcattagtccgattctttgtaggaactacccgtaataacgagcttgcaaaatggatctgtttatcataaag

SEQ ID NO: 462733 - DNA, 628 bp, Sorghum bicolor
cgctgcagctgttcatcacacgtcttgcttattaacatctcggaaatattctgccatagttagggcagttaaaccaactctcatacgagctcccggcggttcattcatttggccatagactagagctacctttgattcctcaatatttttttcattaattactccggattccttcatttccatataaagatcatttccttcacgagtccgttcccctactggcggcgaaatacggatacgcctccatgagctttagcaatgttattgattaattccatgatgagtactgttttacctactcctgcccccccaaacagtccgatttttcctccacgtcgatagggagctaaaagatcgaccaccttaatacctgtttcaaagatagataatttcgtatctaactcgataaaggcaggcgcagatctatgaatagggaatgttgcactagtatccacaggacccaaattgtcaataggctccccaagaacgttaaaaattcgtccgagagtagctccaccgactggaacactgagaggagttcccgtgtcaatcacttccattcctctcatcaacccgtctgtagcactcatagccacagctctaactcggatatttcctaataattggt

SEQ ID NO: 462734 - DNA, 488 bp, Sorghum bicolor
  unsure (1)..(488): unsure at all n locations
atatgcatgctttnatgctcgtagcttttatctgcatccatagacgggttagtttgtgtataaaaagaactacataccctatcatattatactacttacacaaaaaaatatctgtattatgatcctggaaatacattgagaaaatttggccccgtcgtttctagacaatcttatttttctgcttttttataaatggtggaggcattncaattnccttaaatactaaacctactaaanntaccaaaatanannntaanttaaaatctntcatanaatatntntctaaattcaaatttactatttctatctattcnaaatatatcttaaaattcttatnatataattaaatatatctattataannaatattnactattnnattttttaattaaaaaaataaaaaaatttcaaaaaaaaaaaactaaaaaannaaacccatnaaaataaaatntnnaatttatcttttnccattntaatnnnccttctat

SEQ ID NO: 462735 - DNA, 603 bp, Sorghum bicolor
  unsure (1)..(603): unsure at all n locations
cgctgcagttgttcatcaattcccgaagagctatatactctttttgctgatcaaggacgatcacaatgtcaggcaacctcgtcatatatttgatcccgccgagatatctttgcaaggtagataattttctctttaagattgccgcatctctttttgggagatggtggaattttcccattttttcttctgctcttaagtctctaaattgagaaagtctagttgtggtaatcgaccaattcgttaacataccgctgaaccactttttattaacataatgacaacgagaccttattgcagctgatgctactaaatccgctgctctttttttggtaccaacaattaagaagctttttccctgacttgctgcatcaaaaactaaatcacaagcttctgataaaaaacgagctgttctagcaagatttgtaatatgagtacctttacgctttgccgagatgtaaggggccattttgggattccatttcttaataccatgaccaaaatgaactcccgcttctatcatctctttcaaattgatgttccaatatcttcttgtcattntttccacacttcctttntattttttcttttttcgtcttaccatta

SEQ ID NO: 462736 - DNA, 586 bp, Sorghum bicolor
tcatcatatcgaatccgattctaaaatcattccttagaaagccacacaaaagatgactgtgttataggcattaaggatatagatctaaccagattccgcccccctgaatgcatatatattttacctcttccataatatagtctattctctctcctacaactctaggttgtatattcatacgcctttcgaactatttagttttccaaccggggggattatccggaatcatgcatgaattgggctaagctaaaaaaaaagactatttcaaaaactagttaattcaatgatgaccttccatggattcacctatataggctgcggctaacgttgcaaaaataagagcttgaataccgcttgtaaataatccaagaaacatgaccggtatagggactactaaggggactaaagaaacaagaacaacaacgactaattcatccgccaatatatttccgaaaagtcgaaaactaagtgataacggttttgtgaaatcttctaggatgttaataggtaaaaggattggggttggtttaatatatttttcgaaataactcaatccttttttgctaagacccgcataaaaatatgc

SEQ ID NO: 462737 - DNA, 621 bp, Sorghum bicolor
acaacccctggggatagggtaatacatctaagaaattattccatcgaacgtactcccccctggatccgggaatagcaacatgaactaaatgtcctgtccaagccaaagaacttactccgaaaagtcctgacaaatgatgattcagacgagattcggcgtttttgaaccacgaaaggcttggcttccatttgggttgtagatgtaaccaaccccctattaaggatagcgtagaaagaaataatagaaaaagagctccagtataaagatcttcattggtgcgcaatccaattgtataccaccactgataaaccccagaataagcgatattcactggaccggcagcacctcctcgagtaaaggcttccacggcgggttgcccaaaatgaggatcccaaatggcatgagcaataggtcttacgtgtaaaggatcctgtatccatgattcaaaatttccttgccaagctacatgaaacagatttccggacgtccatagaaagattattgctaactgcccaaagtgagattcaaaaatgttctgataaagacgttcctcagtaatatcatcatgactttcgaaatatgtgcggtagcaataccaaaccaaatacgacgagtagtggg

SEQ ID NO: 462738 - DNA, 653 bp, Sorghum bicolor
cacggcgtgtatggcatgcctattcttaaatagaagattcgatccgtctgtcgtgctctaagaaatagacgaatcatatactacatacccgcatatcctatgcgggtatagtgagagtggcataactagtatgttgcgattttttatccctaaaaataaaggataatccgcctttccataagaaaggttcttttctttgtcttttctttgtaagataaagaatcagagagatatggattagaaatcaatttccccgtttctctttatcctttatttctatggataataatttttttttattccataaaaaataatggatttagttcatattcactaagccctaaatttttgggccgagctggatttgaaccagcgtagacatatcgtcaacgaatttacagtccgtccccattaaccgctcgggcatcgacccaggaagaatttattctaggctttttgataatctatgattaacctctttttataatactccctacccccaggggaagtcgaatccccgctgcctccttgaaagagagatgtcctgaaccactagacgatgggggcatcactagacgatagcaccgtatacaaccactcgtcattatactataatgatagtatgagcagttttttggaattgtcatatactc

SEQ ID NO: 462739 - DNA, 612 bp, Sorghum bicolor
gcaagttgttcatcacctaggtctccgcgttccgtcatctggcttatgttcttcatgtagcattcagatcgaatgactctatgaaattacgtcgatacttccacatattatgggtaacgtaggagacatccctattttcacccggggttcttaattaccactgcttagctttcaattcgcctctgaccatcaaattaaatgtgaataacccgtcctcctctctttgaaacaaggggcgcttccggttctgtgcgtgcttcaaacaattttgtcttctccatattaccatatctctagagtcaataattttctatgaggaactactgaactcaatcacttgctgccgttactcaacagttttctgttgaggtctatcccgtagaggtagtcaaattggatcagtgatcgatttctaggtttcgtcgtaaacctaattggttacttccaattacgtaaatcaatagttcaaaccgcactcaaaggtagggcatttcccattgatataggaacttttgtaccagaaacaatagtatctccaattatagcccctctgggatgtaaaatatatctcttctcaccatccccatagtgtatgagacaaatgtatgcatt

SEQ ID NO: 462740 - DNA, 669 bp, Sorghum bicolor
tcatcaaacaaaataaaaaggaacatagttccaataaagggaacccagggaccatattcttctccaatctgagttttgctcaagtctcgaataaactcaaggacatattcgaagaaattctgaccatcggtcgggatggtttgtggattccgaacagctatgataactgaacctagcaaaatagtaattacgaaccaagaagtgatgagtacttgggcatgaatttggaaaccccctatttgccaatagaagtgttggcctacttctacacccgatatatcatataaccccttgagtgttttaatggaacatggtgtaatattcatattgtcctctgataaaaattgaacttcaaaaaaggaattcttttgattcaagcatctctttctcaactcagcaacttgaagtattaatcttatatttaatataccaagaaatcacatcagatcataatatatatcaataccctctaatatatatcaatattccccttcttttatctatgcaaaacaaaaaataatagtaattaatcctataaatctacgcagttgctcaagaattaactattcttcttaatcaacgatttcttatatagagagaacggccctcagaaattgcaaatactaatttgttaagaattaatcgaattgaagtcatagtgtcatcgtt

SEQ ID NO: 462741 - DNA, 621 bp, Sorghum bicolor
cgctgcagttgttcatcattgatgccttgaataacatgtaattttcctatagacaagaaacaaaaaagagaaaaaaggaattctgtttcgggaccaagcaaaactggattgctgtgccataggaaggatagctatactaattcggtatactcaaaatacacctttggtacaaaattgacaatctcacgaggatgaaatatcagtaactttctatttactggtggatcccatcttttacggaatcaattccttttttgaataaaaattttgggagctcagcatgtctggaagcacgggagaacgttcttttgctgatattattaccagtattcgatactgggttattcatagcattactataccttccctattcattgcgggttggttatttgtcagtacgggtttagcttatgacgtgtttggaagtcctcgaccaaacgagtatttcacggaaagccgacaaggaattccattaataaccgaccgttttgattctttagaacaactagatgaatttaagagatccttttaggaggcccccaatgaccatagatcgaacctatcctatttttacagggccgaggctggctgttaacggttagcttgacccacggttttttc

SEQ ID NO: 462742 - DNA, 476 bp, Sorghum bicolor
gcagttgttctcatttctattagggaggaaaaacagattttcctttttttgcctatacacatgctgtaacaagaatattagtatactccaaaagcctctgtatccgcgatgcactttcgaaaagaaggacaaaggatgagcggtgggagcacgtactgatttgcctgtgctagatcaaggaaacctcgctatagtggactatatacagatgggaggagtgcactaaagaggacgcttgcttattcattgaacaattgttatgtaccgatgtttatactccttttctcatccgcaactatgatcatcagacagtttcaactagccagggattctgtcaaacagtttctcatcataaaccacgtacagaataacatctactttaatttatgaacagaaatgctaatagagagggtgattattactgctagcaactagcaatactttatgaggcatattaacacattacatagatagcg

SEQ ID NO: 462743 - DNA, 663 bp, Sorghum bicolor
  unsure (1)..(663): unsure at all n locations
tcatcacaacacttttagataaaccccttaagaaattggagggcctagtatatggtgaggtctgttttgctaggcccagcgctaaaaaacctactttcttacgattacggggtttattcgaggatgaaatttcatcctgtaaccacagtatttctccctttttttctaccccaggctttgcaacatttcgaaatcgtttttttgcaacaggagcaggtgctattagagaacaattagcggatttagatttgcgaattattatagagaattctttggttgaatggaaggaattagaagacgaggggtatagtggagatgaatgggaagatagaaaaagacgaataagaaaagtttttttgattagacgcatgcaattggcgaaacattttattcaaacaaatgtagaaccagaatggatggttttgtgcttattaccggttcttcctcccgaattgagacccattgtttatagatctggggataaagtagtgacttcagatattaatgaactttataagagagttatccgccggaacaacaaccttgcctatctattaaaaagaagtgaattagcaccagcagatntagtaatgtgccaggaaaaattggtacaagaagccgtggatacactttttgatagtgggtnccgcgggcaaccgatga

SEQ ID NO: 462744 - DNA, 631 bp, Sorghum bicolor
  unsure (1)..(631): unsure at all n locations
tgtctttttgattccgtcgaaaacgattttacggtataggcgctgaggacgcgccgctctatgccttgcggtaatgattcctctggcattacgacctttaccacaacggtgccgtccatggatcaatttatttcgtggattggatttcacttgcctgtctacggttcccttgcgtgtgctcgttatatgtgttggggggggatgtttcnccgtattattaagtattctcctttagttcgtttctctatctagaagtggaatagaataacccggttgaagggtaatgatcatacgtctgtaatgcattgtatgtcccagaataggtcccattcttctaccctttccgggtagtcgatggctattcacagctactaccttaacaccaaagaagagttcgacccaatgctttatttctgtcttagtgaatcccgattcgacattaaaagtatattgattctttcccaataaaccaaaactcttttctgtaaatactgcgtatttgattccatccataaatcgactttccctcctatgctctgagttccagtatcgataagaattcgagttcttattggtcttatggaatggnattgatataccataacaattnnntatttattgatgaaggatg

SEQ ID NO: 462745 - DNA, 568 bp, Sorghum bicolor
catcaattattcatctactgctggaatctggaatttggatttattttatcgatgcagatggggggtggatagaagggtacattcttttattttagatagaagaaacatttcttctatctaaaataaaagaattttgctgatttatttattgctatatccaatttatagaattgatataccatttaattgatatcatttagcaaaatgagggggagcatatgcatccatctttgggctcgagaatttcacgggatagagatatagtataagaaataggctattaagtaactctaaatgaattgtggatacatctgtatccttaacatactgaaacgactgccattattcgtatcaaaccaatagcgattcataaaagctaaatcttgtaatcaatggtgtgccaataatgaatttttttgcatatgtattaagacgcttggtctgatttcgaaattgtccagagttttttatgttgttttcattgcaaaatgatggatctccttccgtaactttccaattacaaggacgagaattgaaagacatgaaaattctcaattctctacggcgt

SEQ ID NO: 462746 - DNA, 494 bp, Sorghum bicolor
aagcgcattgaattcctggggagttatacatttgtgtattgataagaccattcacaatttcttgaagctcgatctcccccccagatgaaccatatagccaagagaaaccatgaaccagaatagaagagcttgccccacccatgagtaaatatttcatagtagcctcattagaccgtagatctctcttggtatatccagacaataggtaggaacataaactgaaacattctggagctacaaagatagttattaaatcgttagcaccacataaaaacattccccctagagtagctgttaatacgaataacagaaactctgttatagccatttctgtacattcaatgtactctacggatagaggaatacataaagttgaacataataaaataagaaattgaaagatttcgttgaaattgttcgtttggaaatttcccgaaaagctaattataggttcttctttccatcggaacaatagggccgttatgcttattact

SEQ ID NO: 462747 - DNA, 551 bp, Sorghum bicolor
  unsure (1)..(551): unsure at all n locations
ttaatctgcttggacccgctccaatacccataggaaaatccccagtcatattcagcgtacctgtccctgcaatcaaatagattgtcccaagggccccatattctaggagcccaagttatgctattgaaaattcgttcctctagcagttccggtttgaccattccgttccctttttcaaactccacttcttttcatatagcatccctaatcaaagagagaacaatatccatttcaaaacatttctaacggattccttggttcggaccgacgaagtaatggcactcgattattatcaacccgactgcaatctttttctgtcggtaaggattgcaccagagcaccttctacttctaataggccatgaactatagatagagaagaatcattctgagcgagtccataagaagcgacccactttttcatcggttccggnggaagaccaaagatcttgcgcgaccggtccgccagaaaaactcaaaagagaaagaagtctcgttaatctcttcatgctcgttccaagttcgaagtaccggttggccaaagaaaaagcc

SEQ ID NO: 462748 - DNA, 547 bp, Sorghum bicolor
gcaagtagttcatcatgcttttgcacatcgaaaccaaaattaatctcgcggatacatataattcggaagaataggtgagtgattcatacacagcattcctttcttttaatcgagggttctagcaattgatatcctttcgcaaataattgaaatgcaatttcgtgatctggatctttaattgtgggaaacttctcaagttcttccgccaatccttgattaatgaatctacaaaatccctcgaattggatctgactaaatccgggtattgtggacattccctcatttccattccggagcatttgaatcttaagtttcctatttatagaagaaaaattccattatcagctcactcttcatcaatccctacggatcaatctagcaatcatggaatccatattctgtttactgaatcacatgaaattctagggaactccacatacgtatttcatatatgtatttcatacatatgaatagagacgatttcgacgaaagttcgaatttcgcaggggtcgaaatggataaaaatgaattgataaacagtcctaga

SEQ ID NO: 462749 - DNA, 598 bp, Sorghum bicolor
ttgtcctatcataccttcttcgtgtatacgaaatagtagacttgactaactcaattcttaggaaatcgcgaattagatcgtttgttcttacctcaacaagagaagcacgagccccctcttttacttcttgttcccaattcactactaagcaagttcgaacgaattgactattcgtgtgataaattctttgagttaacttgctattttcatgagaaataaaattgacaagtcgaagttggagattatcctcttcttgcaggagatcctgcgggaaaagtgttgctaaatttctcccttcgtccatttcatatgagactgcaggtcgaaccgaaacaaaatacttttccttgcttttgagaatttttttccgttgaacataaacccaatttttccttttttttgattccttagaatcttttttttctctttctgggggtatcaaactgccacctaatatcttatccgcctcttcaggaaaatgaatatttccggaaaagattttgagttctgtatggcttttttttctcttcactcggaccaatccacctagtcgacttcttgaattttttgggagttgggatcgactccaataatacta

SEQ ID NO: 462750 - DNA, 590 bp, Sorghum bicolor
tcatcacaaacgtccaattatgaaatccttggaagaaaaggatgaaccgaatatagctgctacgcgcaaaactcggcgcaaagaaccaaccagattgtcccagtggataaataaggaatacggaaacaaaaacagcgattggaccagagaatgaaattgcattataaggccgcaattgaacagaccgagcaagttcaaattgacgtagcatagaacctattagtgcaaaagctccatggagagcgacaaaagtccaaagaccacctaattgacaccaacgagtaaaatccccctgtgcttccggtccccatagtagcaacaaagagtgtgctaaactattggcaggtgtggaaaccgccgcggttaagaaattgcaaccttccaaataggaactagccaatccatgggtataccaagaagttacaaaagtagtccctgtaaaccaaccccctaaagcgaaataagcacaaggaaagagcaataagccggaccatcctacaaaaacaaaacggtcccttcgtaaccagtcgtccataatatcaaatagatcgttttcttctttagtaactctaccaacggctatagtcata

SEQ ID NO: 462751 - DNA, 577 bp, Sorghum bicolor
  unsure (1)..(577): unsure at all n locations
tcatcacttttatcaagtagntgggaagaccataagtattcctttagttgcccatcggcgctctaacaaaaatacttgtatgcaccaaaaacctcgggttccgcggggtaaatccattaaaaaagggcaaattttagcggagggagcagctacagttggcggggaacttgctttaggaaaaaacgttttagtagcttatatgccctgggagggttacaattttgaagacgcagtactaattagtgaacgtttggtatatgaggatatttatacttcttttcacatccgaaaatatgaaattcagacggatacgacaagccaaggctccgctgaaaaaatcactaaacaaataccacatctagaagaacatttactccgcaatttggacagaaatggagttgtgaggttgggatcctgggtagaaactggcgatattttagtaggtaaattaacgcctcagatagcgagcgaatcgtcgtatatcgcggaagctggattattacgggctatttttggtcttgaggtatccacttcaaaagaaacttctctcaaactacctatagggggaagagggcgc

SEQ ID NO: 462752 - DNA, 565 bp, Sorghum bicolor
  unsure (1)..(565): unsure at all n locations
cctgttagcattctaaggtcaaaagtattgtttaaatttaagtaaaggagagtggctttatgtatacttaaatcgtataaataggggtaaacggggtctctgatgtttcatagaaattgtttgttacgtcagaatcagaagaaactaattctgtatggagaaacaaaatatctctcatttccgacgctaatagattgtgttgttaatttcgaaataaaggttcttgtcttgtggggaacgatgcacaaatttttggaatccggtaccaacaggtataatcccccccagaactacgttttctttcaggcctttcaaccaatcaatacgacctcgtagggcagcttttgctaaaactcgagcagtttcttgaaaacttgcttcagatatgaaactttgggtattcagggaagcccttgttattcccaataagattgcccgataatagatcgattcatctaaagcccgccctgctcgntccgctcgcaataatcctattaattccccaggtaaaaaaacattagacattccatcttcggaaacccttacttttgatgttacttggcgt

SEQ ID NO: 462753 - DNA, 133 bp, Sorghum bicolor
gcatggacttacttccttcctattataacttttttaccgtctgtgtttttctttgtatcacgaacctttggattgtcttcaattggatgggggaatccaattgacagcctcgactcgtatcctagctcgtctg

SEQ ID NO: 462754 - DNA, 540 bp, Sorghum bicolor
  unsure (1)..(540): unsure at all n locations
gtttccgggggcgaatcactttgaatttgataaatgcattgcttgtgaagtatgtgttcgcgtatgcccgatagatctaccccttgtggattggaaatttgaaaaggatattaaaagaaaacaattgcttaattatagtattgatttcggagtttgtatattttgtggtaactgtgttgaatactgtcccacaaattgtttatcaatgactgaagaatatgaactttctacttatgatcgtcatgaattgaattacaatcaaattgctttgagtcggttaccaatctccataatgggagattacacaattcaaacaattaggaattcgcctcaaagtaaaatagacgaagaaaaatcttggaattcaagaacgattacggattactaggtattaggatttttttattagaaaaatccatttttactaactctaaggaaaaaaaaataactactgcttaacaacttatatgcatatacaaaaaaatatcctaatacctttttncttncttgaatcttttaattttagtcagttcatgaaaa

SEQ ID NO: 462755 - DNA, 539 bp, Sorghum bicolor
aatacctctcgtcccttctgcaaattcgactaattcacctgacattatttcaccaagacctataatacgagcaatcccatcccccacttgcactacgcgaccgatattctcaatccctactttcctattatattgttcaatacgttcgcggagaattttattaatttcgtcgactcgaagggttgccattagtgtttctttaattttttggaagcaagggaaaaataatgcctaaattctaaacaaaagtagaagttcaaaacctaataaatttaattatctcttccattctatggccccgagaatgccaatattagcacgaatcgtacggaaatgtaactcggtattcaaacaactattcagagttcctagagctccttgtacagcttgttggaaaacccgttgtcggacctgattcatcgccctttgtttttcataaaaaagggtttcgtttttagacttttctaattgttccaaactaatagaagtagcattaatcaaattttctttttctcgttctatttcagagtatccattca

SEQ ID NO: 462756 - DNA, 578 bp, Sorghum bicolor
gcaagtagttcatcaaggattgctaaaaggaaaatttgggaaaaggaacccattgtatgggaaatacttcaagaagttatgcggggacatcctgtactgttgaacagagcacctaccctgcatagattaggcatacaggccttccaacccactttagtagagggacgtactatttgtttacatccattagtgtgtaagggtttcaatgcggactttgatggggatcaaatggctgttcacctacctttatccttggaagctcaggcggaagcccgtttacttatgttttctcatatgaatctcctgtctcccgctattggagatcctatttgcgtgccaacccaagacatgcttatcggactttatgtattaacgattggaaaccgtcgaggtatttgtgcaaatagatataatagttgcggaaactctccaaaaaaaaaatcaactacaataataacaattattataagtatacgaaagataaagaaccccatttttctagttcctatgatgcactgggagcttatagacagaaacgaaatcggttaaacagtcccttgtggctccgatggaaacta

SEQ ID NO: 462757 - DNA, 559 bp, Sorghum bicolor
gggacgcacaataccatcctatatgcggtagaggctgaaagtcctcgcaatcatgctggctataagacatgcaggcttagcaagagttgggatgggcgatccgtgtgacgctctgtcgagttagtacggcgcctggctgaggggggatgtgctaataggatgaccaaaatggaactcgcgcttgtatcatccagtctcaaattgttgaaacgatggcttcttgtcattttttccacacttcctttttattttttcttttttcgtcttaccattacggaattaatttctttttgaagattaagaaagagccgaaatagcttgaaataaataataattgttccgatggaaccttctactcataattgaccattgatacacggtataaacatagccttaatgaattaactgacttcttttacttattcaaatacaattcaaatacaattcaaattcaaatacaaaatcgaaaatcagacctgttagcattctaaggtcaaaagtataggttaaatttaagtaaaaaaaaattgctttatgtatacttaaatcgtataaatag

SEQ ID NO: 462758 - DNA, 607 bp, Sorghum bicolor
  unsure (1)..(607): unsure at all n locations
cctaaccgcatggataagctcacattaactcgtcaattttggatccaattcgggatttttcttgggaagtttcgggaagaaattggaatggaataatatcgattcatacagaggaaaaagttctctattgatgcaaacgctgtacctagaggatagggatagaggaagagggaaaaatcgaaatgaaataaataaagaataaagccaaaaaaataagtcgaagatagaagagcccagattcaaaatgaagaaatggaaactcgaaaaggatccttctgattctcaaagaatgaggggcaaggggattgataccgagaaagatttcttcttattataagacgtgatttgatccgcatatgtttggtaaaagaacaatcttctcctttaatcataaatggaaagtgttcaattagaacatgaaaacgtgactcaattggtcttagttagtcttcgggacggagtggaagaagggcggagactcccgaacgaggaaaaggatcccttcnaaagaattgaacgaggagccgtatgaggtgaaaatctcatgttcgggtctggagagggacagtaagggatgcttatctgtcgacttttccactatcaaccc

SEQ ID NO: 462759 - DNA, 605 bp, Sorghum bicolor
atacatctcggcaaagcgtaaaggtactcatattacaaatcttgctagaacagcgcggtgttatcagaagcttgtgatttagtttttgatgcagcaagtcagggaaaaagcttcttaattgttggtaccaaaaaaagagcagcggatttagtagcatcagctgcaataaggtctcgttgtcattatgttaataaaaagtggggagcgggtatgttaacgaattggtcgattaccaaaactagactttctcaatttagagacttaagagcagaagaaaaaatgggaaaattccaccatctcccaaaaagagatgcggcaatcttaaagagaaaattatctaccttgcaaagatatctcggcgggatcaaatatatgacgaggttgcctgacattgtgatcgtccttgatcagcaaaaagagtatatagctcttcgggaatgtgccattttggggattcctactatttctttagtcgatacaaattgtgacccaaatcttgcgaattatcgattcctgccaacgatgacactatgactttaaatcgattaattcttaacaaattagtatttgcaatttctgagggccggtctcttttttaagaaatc

SEQ ID NO: 462760 - DNA, 564 bp, Sorghum bicolor
  unsure (1)..(564): unsure at all n locations
gttctagtaaaccaaaaccatcgttttttatctattgggcttccatgtgctacgagacaaaagaagatttanttacgattggaaataaacttttttgtatcttcatccatagatcctttactcatatttattcaatcggaatacttatcggaatacttaatccaatgcaaaattttgcttcgcgacttcttactcatggggggggtttgtattttanatgcaaattcaattaatctttgnatactaatcgcgagaatgtatattcttcctcaatatgctattgagaggaaaaggattaaaccctttataagaactaaagttttcatcggaatatgaatataaaaaaacttaaggatgccttaagtatatcatttcaaattcagttattaatagaacgaatcacacttttaccactaaactatacccgctacatgtagattatgataccaatgctaccctttgtcaagggtaaccattcgaaaaggaggctaattccaccttatcnaatcaaaggagaaagttcatggccgggggcgattggtccttcaaatccgggtctttact

SEQ ID NO: 462761 - DNA, 597 bp, Sorghum bicolor
aacgatatcccaaagggataactaaaaaacttaataaaacggatatgactgctatagagggaccaatgctaaataaaggaatctctcctcgggatgggaggatatcctcttttaaaagtagtttagttccatctgctatagcttgaagcagtcccagggggccagcatattcaggaccaatacgttgttgtatcgatgcggatatttctctttctaaccacacaattacgagtacttctattgtgattcccagtaggagggccaaaatgggtagaatccatataagtccgtagatttcttttaataattccgatttcgaaaaagaattgatagtttctacctctaccctatctattatcatttcaacgatcaacttcccccataatgatatctatactacctaatattgtcatgatatcagccaatttcatttttttaactagctgaggaagaatttgcaaattaataaaacccggtggacgaattttccatctccaggggaaaagactatcatctcctaccagataaattcctaattcgccttttggagcttctactcttacataaagctcttgctttgataattcaaaattgggc

SEQ ID NO: 462762 - DNA, 551 bp, Sorghum bicolor
  unsure (1)..(551): unsure at all n locations
tgcaagtagttcatcagtttgttttgtgggcagtggcccaaacggttaccaatagggatgaggtagcgtttccttattcttttattaatttaaatcgattcgattcgggaatttaaaactacgagactaagatgtcagaaatcttcgtagccaaaggtccctaaggggcagtcttttttcaatctaagattgaagaagggactttgcgaagaaatagaaagacttcctaattatcatacattttatttatcgtacatcttactacatacacttagtatatcttatgctacctacatacactaaagtaaaggctactgattctgtcgagaattagattgaataggctgatcaaaaatcaatttttggattgtggataagacctccttactctttcatagaaagatagaaagcggggcagcagtagggtttaggtcaaaaataaaaataaacatgggtaagttaggtatccaataaatatttatttatcctaattttatggtatattcttacgtcctttgcttataaanagtaacaaacgaaagaaaaatctc

SEQ ID NO: 462763 - DNA, 611 bp, Sorghum bicolor
tcattccttattttttattttgagttctttcttttaggtaaaagaaagaatgctataagtaaaagcaaagaccttaattttactttacaaaaaaaatttctttcttttgttattcgagtcgaagaagtatgagaattttataactacccaaaaacgaccaatcttttcattggcatagcttatttgtttaatagcttatttgtttaatagttaattgtttttgttacagaaaaatctattaattcattaaattaattccgctttttttgaggttgatagtttatttgttgggaaagggtcgatccttctcatttcaggattgatcatcttgagttctctgttgagaatggaaattcaataataaaaataaagaagtcttaagtaaactcttttattcctctttttcgaactatgtttcattcatatgatagaaagaatatgggtttaaataaattgtatctttgcagagtgttccccgataaatacttatttcttttatccaattttctccatagatagcaggtttgaattagtatacaaaagcaatgactattcatgattccatccatattggatcaattctcgataccattttgcaatgaaattagagg

SEQ ID NO: 462764 - DNA, 482 bp, Sorghum bicolor
tcatcataactatgaatgaaaataaattgctatgaaggcatatgaaatcaaacactttaacatgagtctagggaccaatgtcgaccaagccagcctaaacgaatagaaggatagagtcacgtctataatcctgtccaataatataggaagcgacagtgcgtaactatttaaaagtcaaattggtatgatctatcgaccatatgggacgcccaaaactgaggagcgcctctagcagggatagggttaagaattcctattagtggcccctgaactaaccttttagaaaatctaactatcattgattattgatcacaactgtatgtattgacaaatatgcgataaatatacagaataggaagtacaatactgtatagaatagtcaattgagcgaagggactgacctactataagatcatttcatagtgggaaatgtgcttaggaacatacatgatctaaatctatagtaaaggatcgaataaagc

SEQ ID NO: 462765 - DNA, 547 bp, Sorghum bicolor
tcatcaatacaggactctagagaaagatcagaggaagaatatggcagcctatagaacaaatatgggacccgagagggagagggctaatatgaaatcctagaggaagactcagaagaagaatatgggagctctgaagatggctcatagaaggaatatgggactttagaagaagactcagaggaagactcagaggaagactcacaagacgagggtgggagcccggaggaagattctatcttaaaaaaagagggttttattgagcatcgaggaacaaaagaatttagtctaaaataccaaaaagaagtagatcggttttttttcattcttcaagaactgcatatcttgccgagatcctcatccctaaaggtacttgacaatagtattattggagtcgatacacaactcacaaaaaatacaagaagtcgactaggtggattggtccgagtgaagagaaaaaaaagccatacagaactcaaaatcttttccggagatattcattttcctgaagaggcgggtaagatattaggtggcagtttgatacccccag

SEQ ID NO: 462766 - DNA, 682 bp, Sorghum bicolor
tcatcataacgagtcattgtatttttctgttcatacgaaggaaacaaatatgtgattgtgaaaggggaaaatcgaaatgaagccctttttgttcagtctatctggacctttttgtataataggaattaattagaatattatattctaagtatttcgtttcgtctaggaacagaacctcaaaatattcctttactttaataaaatctggagtggtgttgtataagtgaacatgaatttattatcactcaatgagcatcttgtatttcatagaaattgggggttatatagtccttacgtaagggccagcctatccaactttcaggcattaagatacgtttaagacgtggatgattatcataagaaattcccaccatatcataagattcgcgttcttgaaaatcggcacttctccaaacccagaaaacagacgggattctaggattatccttttgggcaaagacttttatgcatacctcttctgggttatctataccatactgtattctcgtaagatgatacacgctagctaaagatccaccgggtgctacgttataagcacattgggaacgtaaataattgtaaccatatacatataaaatgacagcaatggaatcccaatcccccgcttttatttgtaaaagctcgactcctcgatgatcgaagcccaaagacctatgaacca

SEQ ID NO: 462767 - DNA, 450 bp, Sorghum bicolor
tcatcataccagttatcgtgcctacggtaaacgctgggtagcccaagtgtggagaaggatgagagctgcgtgaaagcatataagtagtaagcccaccccaagatgagtgctctctcctccgacttccctagagcctccggtagcacagccgagacagcgacgggttctccacccatacggggatggagcgacagaagtatggaaataggataaggggggggcgagacgagccgtttaaataggtgtcaagtggaagtgcagtgatgtatgcagctgaggcatcctaacgaacgaacgatttgaaccttgttcctacacgacctgatcaaatcgatcaggcacttgccatctatcttcattgttcaactctttgatgaaaagaaaagatgaaaaaaccaaaaaaaagctctgcccttccatctcttggtttaatagagagggagggcagag

SEQ ID NO: 462768 - DNA, 430 bp, Sorghum bicolor
  unsure (1)..(430): unsure at all n locations
catcagttcagcagatatatgacccatgctcctttaggctctttaaattccgtgggtggcgtggctaccgagatcaatgcagttaattatgtctctcctagaagttggttagcgacctcccattttgttctaggattcttcttttttgtgggccatttgtggcatgcaggaagagcccgagctgctgcagcaggctttgaaaagggggggggtcgtgatttggaacctgttctttacatgacccctcttaactaagattttttatttatacctgttctagtttttttctgttctggctcggttattccatctagccgagccattcatgcttttttatgaaagaatgatataagggggctgaacaaagaaaaacatagatggaaagaaacaaatgtnttaaatatacaaanggggagagagggatnngaac

SEQ ID NO: 462769 - DNA, 228 bp, Sorghum bicolor
  unsure (1)..(228): unsure at all n locations
atatatacatatatagagatatgtagagattttcttttctatatatcttgatctcgaagtttttttatggcgagatttaaaatcttgagaaaattaagaaaaataagaaaatctttcatattatctcttatcacttgcacaaagtataggtatttattattatataaataaatacatatacatattatgtataataaaggacatgaacagagagnngacacaccnaaa

SEQ ID NO: 462770 - DNA, 427 bp, Sorghum bicolor
  unsure (1)..(427): unsure at all n locations
tcatcacgttgcataaaagttcgtaccgtacttttatgtttacgagctaaagttctagcacatgaaagtcgaagtatatattttagtcgatacaaagtctgttttttcgaagatccactatgataatgaaaaagatttctacatatccgaccaaaacgatccagaatatcccaatctgataaatcagtccaaacgggtttactaataggatgccccgatccagtacaaaattgagcttttgataaggatccaacgaggggagttgcagggactgtggtatcgaattttttcattcgagtatctattagaaaagaattctccagcatttgattccttactaacaaagtatttattggtacacttgaaaggtaccccanaaaatcgaagcaagaagttgttaattgggttagacgactcctttggggct

SEQ ID NO: 462771 - DNA, 359 bp, Sorghum bicolor
ttttctaatagaatctattccaaattctactattgaatttgatttcagatattgtgcaatgggatatggctcggacgaataatctaatacatagaaaagaagaatatatatgcataatataataaagagaaaatgccaagagattggcattttcatttgatcattatatacatttttgagatattttgttttttttatttggtggggggggaaggataaatagttcactaaggagaagatagaatcatagcaaatgaaatttctaattcagcttagaaaaaaagaatgaatatcaagcgttatagtatgatttggaatactctaaaaacgggaggagggaggcgggagagagaaaaact

SEQ ID NO: 462772 - DNA, 391 bp, Sorghum bicolor
agagtagagattcatattcttaccaagataactggaagccccaaccgctaagagtcctgatgaacctagaaaaagaatacaggcccagaaaaaattacctctttttcgagaaccttttagaagttctatccatatgtgttctgatcgccaattcatattagatatactaaatccagtagcggtcaattgaaattgagagagtggggtgaatgatttttactttactttttttgattctgaaatagccttcagtagctagtactcctgtgaaataattggttagatacattgactttctattcaaaaaaattaggggatccacttaaaataaaaaaaaactcgctatagtcggctacgcatatgcatgcatttatgctcgtagcttatttct

SEQ ID NO: 462773 - DNA, 314 bp, Sorghum bicolor
tcaaaatgacaagttcttctttacccagaaaaaaagaaccagttagaatagccaaacagattatatttgttgagaaatgcaaaatgatatggagatgatcctcattatctattttggccaattgtattatttccttgtgtattcctataggaagtttttgtacatgtgtcttcggtttctctttttgaggggggggcaagagaaaaagttcttctaattctatgaatccttctagaatccttttctcttgaatatcagttaagaaagtttcggattgcctggtattccaccaattcttaatccaaaggcccaga

SEQ ID NO: 462774 - DNA, 364 bp, Sorghum bicolor
  unsure (1)..(364): unsure at all n locations
attgtctttccttccaggataacttgtatccatgcgcttcagattattagcctggagttcgccaccagcagtatagccaaccctaccctatcacgtcaatcccacaagcctcttatccattcccgttcgatcgtggtgggggagtaagtcaaaatagaaaaaactcacattaggtttagggataatcaggctcgaactgatgacttgcaccacgtcaaggtgacactctaccgctgagttatatcccttccccgtcccatcgagaaagagaattaacgaatcctaaggcaaaggggcgagaaacgcaaggccaggccactcttcctccgggctttctttccgcactattatggacagncaaata

SEQ ID NO: 462775 - DNA, 344 bp, Sorghum bicolor
  unsure (1)..(344): unsure at all n locations
ggtacagttgttcatcaaaaatagaattagtcccatctcattatggaccgaagggggctggtatttttccaagaaatctctagccaaccttcccccaagaggtttttcttaacaccaatgaattatattaatgctagaggaaaacgatagctccaagaatttctttgttctcaacgcctcctatttagaggaattagccacttcaacgacctttgatggttataagggtatccaaagtacaaaccttgatggttgtttgttatcccaaccattcttcccaaccctgataccaatcangaaagggctaattnctaacaaagnnttcctctcggggacccctattt

SEQ ID NO: 462776 - DNA, 335 bp, Sorghum bicolor
  unsure (1)..(335): unsure at all n locations
tttctcaaatttgttgatttatggttaaagaagaaaaacaagaaacaggggttctgttgaatttcaagtattcagtttcaccaataagatacggagacttgcttcacatttagaattacacaaaaaagatttttcatcggaaagaggtctacgaagacttttgggaaaacgtcaacgtttgctggcttatttggcaaagaaaaatagagtacgttataagaaattaatcagtcagttggatattcgggagaagtaatttaatcgttcgaatttttttcctattttattagtagtcttatagtantcttagattttgcnttttgacgagcctcgtt

SEQ ID NO: 462777 - DNA, 481 bp, Sorghum bicolor
ggtacagctgttcatcaatcccattttgaggaccacagaataccttggatagtaccacaatctcttctacgcacaataatatgttgaactacttcaacaagtctacgtgtaagatagccagcatccgctgttcgtacagcagtatctacaaccccttttcgggctccgtagcaggaaattatatattctgtcaaagaaagtccctcgcgtaaattgctttgaataggtaaatcaatcatttgtccttgaggatccgccattaaccctctcatacctactaattggtgtacctgagatgcatttcctctggctcctgaaaaagacattagatagactggattagaaggatccgttattcgaaaattcgaattcatttcttgtttcaaatattcacttgtagcataccatatctcaacggattggcgtaatttttctaccgcgtgcacagctccataataatagtgcccctccaaaagaaaac

SEQ ID NO: 462778 - DNA, 307 bp, Sorghum bicolor
  unsure (1)..(307): unsure at all n locations
agacgcatgcaattggcgaaacattttattnaaacaaatgtagaaccagaatggatggttttgtgcttattaccggttcttcctcccgaattgagacccattgtttatagatctggggataaagtagtgacttcagatattaatgaactttataagagagttatccgccggaacaacaaccttgcctatctattggggagaagtgaattagcaccagcagatttagtaatgtgccaggaaaaattggtacaagaagccgtggatacacttnttgatagtgggtncngngggcaancgatgagggatg

SEQ ID NO: 462779 - DNA, 223 bp, Sorghum bicolor
gtacagtttttcatcatttattctttattcaggtctgtcttttggacttcctttgcttaggttcgggcgcggtggtggacaaacagagggaaagaaagtatggcgggggacaaatttcttgtgagcaaatagaattgcttgactttttcaattaagttcaactttgaacttacagaaattttgtaaaaaaaaatctataccctcccatggaagggtggggggg

SEQ ID NO: 462780 - DNA, 381 bp, Sorghum bicolor
  unsure (1)..(381): unsure at all n locations
cacatatcgcgaatcctttattcttgcccgcttcaagatatgatgactaattaaacaatctgaaccttggggtaaagagtttacactgcttatgtttactttaacttttttcttgtacgtaggaaatgagattttttatttttactacaaattaataagctgttttgtttcactcatatagctatcgagtttaacttaccagggggggggcagaataagcaaaggaagataagcattcaatgtattttagaggaaaaagatcctattttaacgaatcacacgtagagatattgctagtacacaaaaagttaatgggatttcataactaatagattgagcagncggctcgcgacngnctgaaaaagaatatgnattatttga

SEQ ID NO: 462781 - DNA, 426 bp, Sorghum bicolor
gtacagttgttcatcagttcacatattattgtgcgtagcagagattgtggtactatccaaggtatttctgtgagtcctcaaaatgggatgacggaaaaactttttgtccaaacactaattggtcgtgtattagcagacgatatatatattggttcacgatgcattgcttctcgaaatcaagatattggaattggattagtcaatctattcataactgggtggggagcacaaccgtttcgagcacaaccaatatatattagaaccccctttacttgccggagcacatcttggatctgtcaattatgttatgggcggagtcccactcatggggatctggtcgaattgggggaagctgtaggtattattgcgggtcaatcaattggggagccagggactcaactaacattaagaacttttcatactggc

SEQ ID NO: 462782 - DNA, 508 bp, Sorghum bicolor
gtacagttgttcatcaattgttccactctgcaagaagtccgaatcagtctcttgcacctccccctttttatgataaatataccagaaataattcgaataaatagcagtctctgacaactcatcctctttaatctgcttggacccgctccaatacccataggaaaatccccagtcatattcagcgtacctgtccctgcaatcaaatagattgtcccaagggccccatattctaggagcccaagttatgctatttgaaaattcgttcctctagcagttccggtttgaccattccgttccctttttcaaactccacttcttttcatatagcatccctaatcaaagagagaacaatatccatttcaaaacatttctaacggattccttggttcggaccgacgaagtaatggcactcgattattatcaacccgactgcaatctttttctgtcggtaaggattgcaccagagcaccttttacttctaataggccatgaactatagatagagaag

SEQ ID NO: 462783 - DNA, 201 bp, Sorghum bicolor
  unsure (1)..(201): unsure at all n locations
tttctcttnactnggaccaatncanctatttganttgttgtattttttgtgagttgtgtatngantnnaataatantattgggaggtanntttagggatgaggatntnggnaagatatgnagtnnttgaagaatgaaaaaaaanngatgtaattntttttggaattttagaataaattattttgtttttaggggggggggg

SEQ ID NO: 462784 - DNA, 430 bp, Sorghum bicolor
tacagtagttcatcaaataaaaaaggagtcttcatgtcccgttatcgagggcctcgtttaaaaaaaatacgccgtctgggagctttaccaggactcactagaaaaacgcctaaatccggaagtaatcagaaaaagaaattccattctgggaaaaaagagcaatatcgtattcgtcttcaagaaaaacagaaattgcgttttcattatggtctgacagaacgacaattacttagatatgtacatatcgctggaaaagcgaaaagatccacaggtcaggttttactacaattacttgaaatgcgtttggataatatcctttttcgattgggtatggcttcaaccattcctggggcccgacacttagttaaccatagacacatttcagttaatggtcctatcgctgctatcccccgcctctcggtgcccaccc

SEQ ID NO: 462785 - DNA, 401 bp, Sorghum bicolor
tacagttagttcatcacattagccattgagcagtcaaagatatatcttccatcaacagaaaaagaataagtattcatttgatcttgatccttgtgcagtgaaaaagatgctatactggatctgcacatacttactgacaatatccataaatggcttgtttttggtaatcgacgaagattaccatattgatattcgggcgcatggtaaacatcagtactggagtgcatttccccgtctgattcggaataaatatgcttttgtaccttttctttaaaatgcaaagtggacgttccggcacgaatctccgcaattacttgttcagattctacatattgatcattttgcactagaatcaagctttttaacggaatattcacactatgtagaatatcctgactctg

SEQ ID NO: 462786 - DNA, 273 bp, Sorghum bicolor
  unsure (1)..(273): unsure at all n locations
atgttttgtataaatgtttcgccgtattattaagtattctcctttagttcgtttgtctatgtagaagtggaatagaataacccggttgaagggtaatgatcatacgtctgtaatgcattgtatgtcccagaataggtcccattcttctaccctttccgggtagtcgatggctattcacagntactaccttaacaccaaagaggggggggggccaatgctttatttctnncttantnaatccccatccnacattaaaactatattcactctttc

SEQ ID NO: 462787 - DNA, 559 bp, Sorghum bicolor
gtacagcttttcatcattcggaatccaaaaatgttgggattgtattaatgggcgatgggttgatgatacaagagggaagttttgtaaaagcaacaggaagaattgctcagatacccgtgagcgaggcttacttgggtcgtgttataaatgctctcgctaaacctattgatgggagaggcgaaattgtcgcttcagaatctcgcttaattgaatctccgggggcgggtataatttctaggcgttccgtatatgaaccccttcaaacagggcttattgctatcgattcgatgatccccatagggcgcggtcagcgagagttaattattggggacagacagactggcaaaacagcagtagccacagatacaattctcaatcaaaaagggcaagatgtaatatgtgtttatgtagctatcggtcaaagagcatcctccgtggctcaagtagtaacaactttccacgaagagggggccatggaatacactacttgagtacctgaaatggcggattcaccccctacattacaatatctcgctccttatccgggagcagccctggc

SEQ ID NO: 462788 - DNA, 442 bp, Sorghum bicolor
  unsure (1)..(442): unsure at all n locations
aggtacagttgttcatcaaattctatctcttgcataggaataactagaattaaaaaaaagggaatgacaaagcatctgggaataaacgattgatttctatcaataaacctgctaaagccccaaaccatagagtacttagcacgggtgctacagagagatatgtttttatatcccgcattgaaaatcctccttccgtattggaatacatatatgatcagatactcttgcccaagatcctttgtatttcttttgtttaggcgaaattcctaactaaaaaaacaaaataaatattctatatatatagaatgaaccgtatagacgagattttcctatccctaaaaaagatgaccccttcttcctatacattactaaggaatagtagnctttcttttataggtgaaatttgactggattttagtttatacccttccttgattatatg

SEQ ID NO: 462789 - DNA, 388 bp, Sorghum bicolor
  unsure (1)..(388): unsure at all n locations
ggtacagttgttcatcatacgttcgcggagaattttattaatttcgtcgactcgaagggttgccattagtgtttctttaattttttggaagcaagggaaaaataatgcctaaattctaaacaaaagtagaagttcaaaacctaataaatttaattatctcttccattctatggccccgagaatgccaatattagcacgaatcgtacggaaatgtaactcggtattcaaacaactattcagagttcctagagctccttgtacagcttgttggaaaacccgttgtcggacctgattcatcgccctttgtttttcataaaaaagggtttcgtttttagacttttctaattgttccaaactaatanaagnagcattaatcaaattttctttt

SEQ ID NO: 462790 - DNA, 108 bp, Sorghum bicolor
cccgccacgcgccacctcccccgccactcgtccccccccccccctccccctctcctctcgtaaccccaccccccccccctcccctccccccccctcccctcccccccc

SEQ ID NO: 462791 - DNA, 460 bp, Sorghum bicolor
  unsure (1)..(460): unsure at all n locations
catcacacaatcccaaataattcgtttaggagtcagtacataaagatttaatttcatttcttcaatttgctctcctcttctaagtttatagctttcgtgctagcttcatcgatgttccccactaaataaaaagcctgttcgggtaggccgtctaattctccggaaaggattagttgaaatcccctaattgtttctgcaagaccaacatactttcctggagaaccggtaaaaacttctgccacaaagaacggttgtgataagaaccgctcgatttttcgtgctcttgctacagttaaacgatcctcctccgataattcatccaatccaagaattgcgataatgtcctgaaagtctttgtaacgttgtaaagtttccttaactctttgcgcagtttcataatggttcgttgccaacgatcccaggctggaacatagttgaggggtgatntaaagggtntact

SEQ ID NO: 462792 - DNA, 373 bp, Sorghum bicolor
  unsure (1)..(373): unsure at all n locations
tctaatgtggataagacaagagttttttaagattttctatttaaatcaatttatatatcaaatatactccatatataaatatatggtatgggggataagccctcatataagaggggggcataaaaagaaggaaggtaaaattcaattcaaatagttaattaagttcagaaagctattgcataattgaattccaagtctctgaggggggacattctaaaacttagagaattctagtcattaggatttccttttatatgaaataagcaatattcgagaatttcctataaatataggtttnctttggaatccaatcaatcaattacgaaacaacagagctcttttattttaacagaaagaaatacaaaaatgatta

SEQ ID NO: 462793 - DNA, 435 bp, Sorghum bicolor
  unsure (1)..(435): unsure at all n locations
gatatgtatgttccataagaaaagaatattaatttttagtttaaatttatagttcaatttttctctaaaattgtttccgattcaccaaacctattcttatctctttctaaaggaattcaaaaaacaaaataagaaaaagaaaaaatactggaattctggatttttcaaatttctctcattaaaatattccaaaattaagaatgggtttagctacttaaattcaaaaagtgaatcaaagaatttcagtatctagttattagttaaaaaaaaatatatttattaaaatacaaactaatcatttttgtatttctttctgttaaaataaaagagctctgttgtttcgtaattgattgattggattccaaagaaaacctatatttataggaaattntngaatattgcttattnatataaaagggaatcctaangactaga

SEQ ID NO: 462794 - DNA, 414 bp, Sorghum bicolor
gtacagttgttcatcaaaagaccattaattatataaggaagaacccagggttctagcccattcccattcctaaatcactaattcgtagtgcttttgcctttcttgcgtactcctgatgaaccagttgctagccatatgtttaggaggcttttttctccaggtactggtactaagccgctttgccatctcttcatcttcatctgcaaagaattctcgacgtgaaaacacagagacaaaggcctgatctttgaataggaaaaagaatggatccgaaggtcccaaatcaattggcttattcgaaaaaagccttcttctttgaaagatatatctcgtgtctggtactgcattgttccactctgcaggaagtccgaatcagtctcttgcacctccccctttttatgataaatataccag

SEQ ID NO: 462795 - DNA, 343 bp, Sorghum bicolor
  unsure (1)..(343): unsure at all n locations
gtacagttgttcatcattacaaaaaaatttctttcttttgttattcgagtcgaagaagtatgagaattttataactacccaaaaacgaccaatcttttcattggcatagcttatttgtttaatagcttatttgtttaatagttaattgtttttgttacagaaaaatctattaattcattaaattaattccgctttttttgaggttgatagtttatttgttgggaaagggtcgatccttctcatttcaggattgatcatcttgagttctctgttgagaatggnaattcantaataaaaataaagaagtcttaagtaaactcttttattcctctttttcnaacta

SEQ ID NO: 462796 - DNA, 318 bp, Sorghum bicolor
tcgttctattaataactgaatttgaaatgatatacttaaggcatccttagctgtgtttatattcatattccgatgaaaactttagttcttataaagggtttaatccttttcctctcaatagcatattgaggaagaatatacattctcgcgattagtatccaaagactaattgaatttgcatctaatatacaaattcgagggggagtacgtagtcgcgaagcaaaattttgcattggattaagtattccgataagtattccgattgaataaatatgaggaaaggatctatggatgaagatgccaaaaaggttatttcca

SEQ ID NO: 462797 - DNA, 360 bp, Sorghum bicolor
  unsure (1)..(360): unsure at all n locations
gtatgcgaatgatgcataattactttcgcatcggaggggtagcagccgatctcccttatggatggatggataaatgtttagatttctgtgattattttttacaaggagttgttgaatatcaacaacttattacacggaatcccatttttttagaacgagttgaaggagtcggttttattagcggagaataagctggaggggggggcttatcgnnaccaatgttacnagcttctgnaatacaatgngatcttcgtaaaatcnatccttatgagtcttacaatcaattcnattggaaaggccaatggcaaaaagaaggagaatcggtagctcgctatttaggacgagtcggggaaatgaggg

SEQ ID NO: 462798 - DNA, 520 bp, Sorghum bicolor
gtacagttgttcatcattactcaatttattcaatcggaatacttatcggaatacttaatccaatgcaaaattttgcttcgcgactacgtactcataatcgaatttgtattttagatgcaaattcaattagtctttggatactaatcgcgagaatgtatattcttcctcaatatgctattgagaggaaaaggattaaaccctttataagaactaaagggtgatcggaatatgaatataaaaaaacttaaggatgccttaagtatatcatttcaaattcagttattaatagaacgaatcacacttttaccactaaactatacccgctacatgtagattatgataccaatgctaccctttgtcaagggtagccattcgagaaggaggctaattccaccttatcgaatcaaaggagaaagttcatggcggtgggcgattggtacttcaatcgcgggtctttactttaggactcagatagcccctctctagtctggaaaatacatctcttcttaccataccaata

SEQ ID NO: 462799 - DNA, 398 bp, Sorghum bicolor
  unsure (1)..(398): unsure at all n locations
gtacagttgttcatcattttttaatggatttaccccgcggaacccgaggtttttggtgcatacaagtatttttgttagagcgccgatgggcaactaaaggaatacttatggtcttcccactacttgataaaaggatcttgtgactatcactagaaatgatctttccctcgcgttcggctataacggaaaccctcgaatctagagctgtttgtcgttccaatccagttccaacaatgcacttctcggaccgagaaagtggaactgcttggcgctgcatattagaactcattaaagcccgattcgcatcattatgctcaataaaaggaatgagagaacctccaatagaaaaatatngnaaaggaaaaatacttntaacatgaatntggtcccatgcaata

SEQ ID NO: 462800 - DNA, 294 bp, Sorghum bicolor
tacatacagcgacggattaacaaaatagaaagttgtataagaaggtgaccctttagtacgttcttttaagataagggagcataagcctattgctttctattactatcaactacgctgaatggataaccatgctgataccatacgagggaattgctgcttccactatagatgattggatttgcaccaaaggaaaccagaaatgtgatgtaccatagaagtctatgatagagcttttgtatactattcattggggccgaacacggatactgaaaaaattcgattatatgcccgaag

SEQ ID NO: 462801 - DNA, 361 bp, Sorghum bicolor
  unsure (1)..(361): unsure at all n locations
aggatntagaggacgaatatgaaacctctagagatgagtatgggatcctagaggacgaatataggactctagagaaagactcagaggaagaatatgggagcctagagaacaaatataggacccgagagggagagggcgaatatgaaatcctagaggaagactcagaagaagaatatgggagctctgaagatggctgagagaaggaatatgggactttagaagaagactcagaggaagactcagaggaagactcagaagacgaatatgggagcccggaggaagattctatcttaaaaaaagagggttttattgagcatngaggaacaaaagaatttagtctaaaataccaaaaagaagtaga

SEQ ID NO: 462802 - DNA, 348 bp, Sorghum bicolor
  unsure (1)..(348): unsure at all n locations
tcatcacctttcctgattggtatcagggtctgggaagaatggttgggataacaaacaaggatgcaggtttgtactttggatacccttataaccatcaaaggtcgttgaagtggctaattcctctaaataggaggcgttgagaacaaagaaattcttggagctatcgttttcctctagcattaatataattcattggtgttaagaaagggggggggggggaaggttggctagagatttcttggaaaaataccagcccccttcgggccataatgagatgggactaatnctatttttattctatagatggggcggttaggactagggatagaagggagcagccatatgaga

SEQ ID NO: 462803 - DNA, 471 bp, Sorghum bicolor
tcatcatcaaattggtaatttttcttacatccccccccccgtgggcccaggtatcatatgcgcgggcaaaataaagagccttgagtactagaagaaaagcacctagacctaacaaaattaagtgaatacccaaaattgtagtcattttatttctatctttccatacataaccaaagaatggaaaagattcttcaagagtctcgggtgcggggggcgcgtgataaatgccaccgaagcctaagactgcggaggaaattaagtgaagtactccggatacaaagtaaggaaaagtatctagaacttctccccccggccctactccccaacctagagtagctaagtgcggaagtaaaatcaacccttggtcatacatgggcttttctggtacgaaatgggccacttaaaatagggtcattgctccggcccagaatacgattaatccggcatgggctacatgagctgcaagaggct

SEQ ID NO: 462804 - DNA, 419 bp, Sorghum bicolor
gtgaaacctgaatactctgaaattcaacagaacccctgttttcttgtttttcttctttaaccataaatcaacaaatttttctacctcctttctttttcatgtatttttctgatcaggaaaaataaaaaattatgtcagttatttttaagttattctaatctcgtacacacaaaaatttgcaattattcatctactggtggggtctggaatttggatttattttatcgatgcaaattggatttggatagaagggtacattcttttattttagatagaagaaacatttcttctatctaaaataaaagaattttgctgatttatttattgctatatccaatttatagaattgatataccatttaattgatgtcatttagcaaaatgaaacacagcatatgcatccatctttgggctccagaa

SEQ ID NO: 462805 - DNA, 432 bp, Sorghum bicolor
  unsure (1)..(432): unsure at all n locations
gtacagttgttcatcagtcttgtttatctcgaagaactggggggaatatctatcccaatgccaaaaatttttaccatgtttagtagcttttcaatggcttctcttgccttgccgggaatgagcggttttgttgcagaattagtagtattttttggactaattactagtcctaaatttatgttaatgccaaaaatgctaattacttttgtaatggcagtgggaatgatattaactcctatttatttattatctatgttacgccagatgttctatggatacaagctatttcatgttccaaacaaaaattttgtagattctggaccacgggaactctttcttttaatctgtatctttttaccagtaataggaattggtatttatccagattntggtntctctctatccgntgatagggtngaggctctcttatcc

SEQ ID NO: 462806 - DNA, 490 bp, Sorghum bicolor
acagctgttcatcaactctatgaattacgtcgatacttccacatattatgggtaacgtaggagacatccctattttcacccggggttcttaattaccactgcttagctttcaattcgcctctgaccatcaaattaaatgtgaataacccgtcctcctctctttgaaacaaggggcgcttccggttctgtgcgtgcttcaaacaattttgtcttctggatattaccatatctctagagtcaataattttctatgaggaactactgaactcaatcacttgctgccgttactcaacagttttctgttgaggtctatcccgtagaggtagtcaaattggatcagtgatcgatttctaggtttcgtcgtaaacctaattggttacttccaattacgtaaatcaatagttcaaacccgcactcaaaggtagggcatttcccatcgatataggaacttctgccccagaaacaatggtatctccccagcctcgccccc

SEQ ID NO: 462807 - DNA, 437 bp, Sorghum bicolor
atggagctatttttttattagggactacaatccggaacagaatgaagatagtgtgtggggcaagaatgttagaccataaggaagctatcatatctcatttaagttgggctagcctcttcctaggattccataccttgggcctttatgttcataacgacgttatgcttgcttttggtactccagaaaagcaaatcttgatcgggggggtatttgcccaatggatacaatctgctcatggtaagacgacatatgggttcgatatactcttatcttcaacgaatggccccgctttcaatgcaggtcgaaacatatggttaccgggatgggtgaatgctgttaatgagaatagtaattcgcttttcttaacaataggacccggggatttcttggttcatcatgctattgctctaggtttgcatacaactacattggattta

SEQ ID NO: 462808 - DNA, 397 bp, Sorghum bicolor
tcatcatataatgaattccttaggaacctttataataaatggaatataccgaattgtgggcagggaatattgctaagtcctggtatttactaccgctcggaattagaccataagggaatttctatatacaccggtactataatatcagattggggaggaaggtcggaattagcaattgataaaaaagaaaggatatgggctcgcgtggggggaaaacaaaagatatctattttagttctatcatcagctatgggttcgaatctaagagaaattttagataatgtttcctaccccgaaattttcttgtctttcccgaatgctaaggagaagaagaggatcgagtccaaagaaaaagctattgtggaggtcgatcaacaactcgcttggggaggcgggg

SEQ ID NO: 462809 - DNA, 384 bp, Sorghum bicolor
  unsure (1)..(384): unsure at all n locations
ctgaaattgatagagaaaacaccgtaaagatcaattagtgagcgactgggtcgatacaactaaaaaaaactgcttcattataccacgatatgggacaaaatttaggaatccgcttatgtaataaagccgatccactaagggattaagcagcggtgtagtatcagatcccaaagatagtaagttcttttttctttcttatggaaaaaggtctttttccaggattctatagaaatttcatatatgaaagaaacgaaaccgagatagttacctttcagaaaattcgaacgaaggatataggtctatctatgcttcattcttctgaaggggggagaaaagatcaaactgattattgatcaaaattagggntngaaactnangnaatta

SEQ ID NO: 462810 - DNA, 381 bp, Sorghum bicolor
acttgcatttttcattgcacacgactttccctatgtagaaatagccgatttctattccgaagaggaagtccactaatttttagaatttttaattagctaaagtgattcacctactatggaacatttcagaatggaaaatgtgcaagttttatcttgatatcgatcttttctagattattaattgtggctaatgattaattaagggggagaggctgcaccagatcatggatacggttaatatccaaataccaaatacgctcagtttgagatccatggagagaaaagtgaattgttctggttatggcgaacatcaaagaaaggactcgctgttatttcgtaaaaaacgcttctaaaaataccaaagccagacgttgcataaaa

SEQ ID NO: 462811 - DNA, 550 bp, Sorghum bicolor
gtacagttgttcatcatttagagttacttaatagcctatttcttatactatatctctatcccgtgaaattctcgagcccaaagatggatgcatatgctgtgtttcattttgctaaatgatatcaattaaatggtatatcaattctataaattggatatagcaataaataaatcagcaaaattcttttattttagatagaagaaatgtttcttctatctaaaataaaagaatgtacccttctatccaaatccaatttgcatcgataaaataaatccaaattccagattccagcagtagatgaataattgcaaatttttgtgtgtacgagattagaataacttaaaaataactgacataattttttatttttcctgatcagaaaaatacatgaaaaagaaaggaggtagaaaaatttgttgatttatggttaaagaagaaaaacaagaaaacaggggttctgttgaatttcaagtattcagtctcaccaataagatacggagacctgcttcacatttagacttacacaaaaaagatttttcatcgggaagag

SEQ ID NO: 462812 - DNA, 653 bp, Sorghum bicolor
gcagctgttcatcaaattatgtcagttatttttaagttattctaatctcgtacacacaaaaatttgcgtgatgcatctactgctggaatctggaatttggatttattttatcgatgcaaattggatttggatagaagggtacattcttttattttagatagaagaaacatttcttctatctaaaataaaagaattttgctgatttatttattgggggtgggggatttatagaattgatataccatttaattgatatcatttagcaaaatgaaacacagcatatgcatccatctttgggctcgagaatttcacgggatagagatatagtataagaaataggctattaagtaactctaaatgaattgtggatacatctgtatccttaacatactgaaacgactgccattattcgtatcaaaccaatagcgattcataaaagctaaatcttgtaatcaatggtgtgccaataatgaatttttttgcatatgtattaagacgcttggtctgatttcgaaattggccaaagttttttatggttgtttcattggcaaatgatggatctccttccgaactttccaaataccagtacgagaattgaaagacatggaaaatctcaattctttacggcgtctaggagatagatcgaatatttt

SEQ ID NO: 462813 - DNA, 208 bp, Sorghum bicolor
tcatcacgaatggctacccttgacaaagggtagcattggtatcataatctacatgtagcgggtggtagtttagtggtaaaagtgtgattcgttctattaataactgaatttgaaatgatatacttaaggcatccttaagtttttttatattcatattccgatgaaaactttagttcttataaagggtttaatccttttcctctcaata

SEQ ID NO: 462814 - DNA, 350 bp, Sorghum bicolor
gcagttgttcatcagttttcaagaaactgctcgagttttagcaaaagctgccctacgaggtcgtattgattggttgaaaggcctgaaagaaaacgtagttctgggggggattatacctgttggtaccggattccaaaaatttgtgcatcgttccccacaagacaagaacctttatttcgaaattaaaaaaaaaaatctattcgcgtcggaaatgagagatattttgtttctccatacagaattagtttcttctgattctgacgtaacaaacaatttctatgaaacatcagagaccccggttacccctatttattcgaattaaagattacataaagcaatttttttttact

SEQ ID NO: 462815 - DNA, 246 bp, Sorghum bicolor
  unsure (1)..(246): unsure at all n locations
gcaagtagttcatcagnaggttatggaagtcaatattctcgcatttattgctacagcattgttcattctagttcctactgcctttttacttattatttatgtaaaaacagccagtcaaaatgattaattggaattccaattaatcattgaagaaatgaaaaagggattaaagaaaataaaaaatccaagtcttaaatgaaagggtctggttggaatcataaaagtgtggtagaaagaactatatgt

SEQ ID NO: 462816 - DNA, 617 bp, Sorghum bicolor
  unsure (1)..(617): unsure at all n locations
gcagttgttcatcagaagtaatgtctaaacccaaggatttcacaaatcaaagataaaggattccggaacaagtaaacacgattttcaaccgtctcaacaatagaattagatcagaataaggaataaaagtcaatttgttcgagatgagataaagaaaagagtttagagacgactcaaaaaatttcgaagggtttttcttttgaagtttgtcagtcaaaattagccaacttgagtcatgagtataaatgaaatttgttttttattttctttaaggaaattaatgcaagtcataatcgaatttctatctatttgcattatagacagaaattcgaatcattttctcgagccgtatgaggagaaaacctcctatacgtttctagggggngggttgtttatctacatctatcccaataagctatctatcgaatcgttgcaattgatgttcgatctcgaagagaaggaagagatcttcgaaaagtaggtttttatgatccgataaagaatcaaacttgtttaaatgttccagctattctctatttccttgaaaagggtgctcaacctacaagaactgtttatgatattttaaggaaggcagaattcttttaagataaagaaag

SEQ ID NO: 462817 - DNA, 554 bp, Sorghum bicolor
  unsure (1)..(554): unsure at all n locations
atctctgaaccatnccatcaaataagttttatgattcattaaatagcggagggggggccctgccataatgtaatgtgttaccaatgccaataaaaagtaacccatcctatggtatttaacatccataaaacagccaaataaaacgcgtcccaagcagaaatatcacaagtaccgacacgcccttttttttttcaagggggggtgtgccctaaatcctttttatccggcattaatttgnaaccgcgtgcatctaaagcaccctttactaaaatcaatgtagttgtatgcaaacctagagcaatagcatgatgaaccaagaaatccccaggtcctattgttaagaaaagcgaattactattctcattaacagcattcaaccatcccggtaaccatatgtttcgacctgcattgaaagcggagccattcgttgaaaataagagtatatccaacccatatagtcgcttaccatgagcagatcgtatccattgagccaaatataggtccatcaagaattgctttttcggaataccaaaagcaagcattacgtcgttatg

SEQ ID NO: 462818 - DNA, 504 bp, Sorghum bicolor
caatatctacagctgtgttaatgggggcgtggtttggtaatacaccaatttggccactattagtagataaaatgatttctttcacttcacaatcccaaataattcgtttaggagtcagtacataaagatttaatttcatttcttcaatttgctctcctcttctaagtttatagctttcgtgctagcttcatcgatgttccccactaaataaaaagcctgttcgggtaggccgtctaattctccggaaaggattagttgaaatcccctaattgtttctgcaagaccaacatactttcctggagaaccggtaaaaacttctgccacaaagaacggttgtgataagaaccgctcgatttttcgtgctcttgctacagttaaacgatcctcctccgataattcatccaatccaaaaattgcgataatgtcctgaagttctttgtaacgttgtaaagtttccttaactctttgggcagttcataatgttcgttggcaaccatccgaggc

SEQ ID NO: 462819 - DNA, 573 bp, Sorghum bicolor
  unsure (1)..(573): unsure at all n locations
tcatcactctctctacccttgggcaatgagtttcgacgtattgggtgtatccgttttgtggcnagctttcatttttgtgcttatcctagttgttggtttagtttatgcatggcgaaaaggagccttggaatggtcttaactgaatattcagaaaaaaaaaaaaaagaaggaaaagattccattgagacaattatgagtttgattgaggggggggtactcgaccaaacaagttctaattccgttatttcaactacaccaaacgatctttcgaattggtcaagactctcaagtttatggccccttctatatggtaccagttgttgtttcattgaatttgcctcattaataggctcgcgattcgactttgatcgttatggattggtaccaagatcaagtcctagacaagcggacctaattttaacagctggtacggtaacaatgaaaatggctccatctttagtgcgattatatgagcaaatgcctgaaccgaaatacgtcattgctatgggagcctggactattacagggggcatgttcagtacagaatcctatagtactgttcgaggagttgat

SEQ ID NO: 462820 - DNA, 675 bp, Sorghum bicolor
gcaagttgttcatcagatcgttctcgcggtatctttttcactcaggactgggtatccatgccaggggggatgcggggtggctacagggggtattcatgtttggcatatgccagctctgaccgaaatctttggagatgattccgtattacaatttggtggaggaactttaggacatccttggggaaatgcacctggtgcagcagctttttttgtgggtttgtaagcctgtgtacaagctcgtaacgaagggcgcgatcttgctcgtgaaggtaatgaaattatcaaagcagcttgtaaatggagtgctgaactagccgcagcttgtgaaatatggaaggagatcaaatttgatactttcaaagcgatggataccttatagatataagtagataaaactagatataaagaaggtctaaataaaataaaaaagaagaaaaatagaaagagaaaaaataagttaagaaatgcagtaattcttctttattcttctaattgattgcaattaaattcggctcagtcttttttttagaaaagattgagccgaatttaaatagatcttgatacgatcatgagacttgacaaatcgagattcttctattctatatatctagaatatagaaagggttaatacaattaacaaatttaaattaaaatatagtattatcggacgataat

SEQ ID NO: 462821 - DNA, 583 bp, Sorghum bicolor
tcatcacttcttataagggctaaaaacgaatcacttatttttttggctttttggccccatattgtagggtggatctcgaaagataggaaagatctccctccaagccgtacatacgactttcatcgaatacggctttccacagaattctatagggatctatgagatcgagtatggaattctgtttactcactttaaattgagtatccgtttccctccttttcccgctaggaccggaaatcctgtattttccatatccatacgatcgagtccttaggtttccgaaatagtgtaatggaaaaagaagtgcttcgaatcattgctatttgactcggacctgttctgaaaaagtcgaggtatttcgaattgtttgttgacacggacaaagtaagggaaaacctctgaaagaatttccatattgaccttggacatataagagttccgaatcgaatctctttagaaagaagatcttttgtctcatggtagcctgctccagtccccttacgaaactttcgttattgggttagccatacacttcaaatgtttctagcgattcacatggcatcatcaaatgatacaagtcttg

SEQ ID NO: 462822 - DNA, 611 bp, Sorghum bicolor
tctattatcatatgaattttctctttcataatcattcctaatttcattctcaaaataaaataaagaacctatattataatatgggttctgtgattaatcgttattacttcgattcgttagaacagcttccattgagtctctgcacctatccttttcctttgggttctagtttgagaaccacttttttgaaaaaagtggatttggctcaggattgcccatttttcattccagggtttctctgaatttggaagttaccacttagcaggtttccataccaaggctcaatacaatcaagtccgtagcgtctaccgatttcgccatatccccattttacttttctttgaaaccaggattccttgtataatttaatccatcttttagttttttttgaatcattgaattcattattcgacgtagtctagcaactcatctttatttgagacaccccgctcgcttattgcaattcagaattgaattgattttatcgttgatatatttgcaattcaatcggaatgaatatatccaaaagtttttctctcttccgcctccctccttccttttttagaagattccaaatcatactataacgcttgatattcattctttttttc

SEQ ID NO: 462823 - DNA, 525 bp, Sorghum bicolor
gcagttgttcatcagcctgctacgcccttcctcgtctctgggtgcctaggtatccaccgcaagcctttcctcttttgaacctcgccattaacgttaaggctatgccatcctaaggtgctactaaatggaaggatcttatcaacgtccatgaatgcgaaatcatagatcgaactgacgaattggcaaccttcggtgctatcatagtatccgctaagttcacgggctggagataagcggactcgaaccgctgacatccgccacagggtaaaccaccgcctctcaggcctccccgacgggttctaccatagaggacaacgataggcaataactcccccccgaacacagcttacaactttcatcgtactgtgctctccaaagagcaactcttctcaaaatcccaaaacaaaaggtgctgagttggaatcccattctaaggattcttgtggttccggggaatccagctacaggagaaccaggaacggggagctctccccttttttcggccgactctttgatcttaactta

SEQ ID NO: 462824 - DNA, 542 bp, Sorghum bicolor
gcagtagttcatcacaacctacaagaactgtttatgatattttaaggaaggcagaattctttaaagataaagaaagaactttgagttaattgaagaactaaatgaataaaaaagtaggagagggtccttagtaccccttaattatttagacacaatttgcctctttcttagtcctatttttttttgctgcatttatatcgtgccaatccaacaaaagtccctattttatttcctttttctatctaattacattgtatttccattgacaaaggtctattgaacaaatagaatttgtagatagatgggtctctttattgtcactccatattaggtatttctgtctacacttcgttcaaatgatagggttgcccctcttgcatgtactctcatacaagattattttacttctttaaataaaaattgccaaaaaaatcacaattttgccattgtgattggggctgctcttagccttagtgaaattgaaccggatctgttcattttggtatttgagtgtttttaatggattagaaaatctttctttt

SEQ ID NO: 462825 - DNA, 630 bp, Sorghum bicolor
gcagtgttcacatcacatccgaagaaatatgcggaagctttgcagaattattatgaagctacgcgactagaaattgatccctatgatcgaagttatatactatataacataggccttatacacacaagcaatggagagcatacaaaggctttggaatattatttccgggcgctagaacgaaaccccttcttaccgcaagcttttaataatatggccgtgatctgtcattacgtgcgactatctccactatagaaagaagaaaaaaagaaaggaggaaattttctagtgaatactagaaaagagggctttctacatagggatcgtcaaaacaacgattttaccctatcagctgtaggaaggaaggacacttcacgagaatcaaaataggaagaaagtagagcctatactactattctatggataaagctgaaattgatagagaaaacaccgtaaagatcaattagtgagcgactgggtcgatacaactaaaaaaaactgcttcattataccacgatatgggacaaaatttaggaatccgcttatgtaataaagccgatccactaagggattaagcagcggggtagtattagatcccaaagatagtaagttcttttttctttcttatggaaa

SEQ ID NO: 462826 - DNA, 519 bp, Sorghum bicolor
ctgccgtgatgaacggcgccattttgggattccatttcttaataccatgaccaaaatgaactcccgcttctatcatctctttcaaattgatgttccaatatcttcttgtcattttttccacacttcctttttattttttcttttttcgtcttaccattacggaattaatttctttttgaagattaagaaagagccgaaatagcttgaaataaataataattgttccgatggaaccttctactcataattgaccattgatacacggtataaacatagccttaatgaattaactgacttcttttacttattcaaatacaattcaaatacaattcaaattcaaatacaaaatcgaaaatcagacctgttagcattctaaggtcaaaagtatagtttaaatttaagtaaaaaaaaattgctttatgtatacttaaatcgtataaataggggtctttgataggaaaagatactgaggacacaatattccaaaaacttttgttctatataatgataatggaggga

SEQ ID NO: 462827 - DNA, 487 bp, Sorghum bicolor
  unsure (1)..(487): unsure at all n locations
aggaaaganacccatnnnnccttttacacggatccactagagatggtgtctttattttgacacctaaaaatgcaaaaatcaattcttaaaaaaattgcaagaattgatttataataagcactcttatcattagtttaggtattgtgtgggtacctaaaggtacgttcaacgtaggctcatttggtagagggggtgatcaaaatttattgctgcagctatacattcaatgtanaagaatttgaattttaaaatcgaaggttcataatataagacttctcagctcttatccatttttttttttggaatgaatacatcattcaatttggcaggcagaatagtaaagatttcatcgaaaacttacagcagcttgccaaacaaacgctaatagaaaaaagagtacaggtatgacaggcataacatccacaattgggtngaaaatggcataagctccgggtaatttggcgaaaaaaaagctagncggacaaag

SEQ ID NO: 462828 - DNA, 667 bp, Sorghum bicolor
  unsure (1)..(667): unsure at all n locations
gcaagttgttcatcatgctcatattttacaagagatacttacttataaatctgatcatcttatagctcgccaagaaatacttaatgctacgatctggggaaaaagagtgcctaatcacgaggatccgccagaatcttttcgagtgctcgttcgagaactacgatctttggctctagaactgaaccatttccttgtatctgagaagaacttccgggttaatagggagganntgtttgatcggaataaatataaatttttttcttatttctattttatgattgaccaatataaacataaacaacttcaaattggactcgtttcccctcaacaaataaaggcttgggctaaaaaaatcctacctaatggggaagtcgttggcgaagtcacaaggccctccacttttcattataaaaccgataaaccagaaaaagatggattgttttgcgaaagaatctttggacccataaaaagcggaatttgtgcttgtggaaactctcgagcgagcgtagctgaaaacgaagacgaaagattttgtcaaaaatgcggggtagaatttgttgattctcggatacgaagatatcaaatgggatacatcaaactagcatgtccagtgactcatgtgtggtatttgaaaggtcttnctaggtatattgcgaatcttttagat

SEQ ID NO: 462829 - DNA, 550 bp, Sorghum bicolor
  unsure (1)..(550): unsure at all n locations
aaaaaaaagaaactccactcttcattgttgataaaacaaaatccctattgactcctttggatatactttttccccataaggatattgaatacaacgaaccttctttagtactactgtaattttgaaaattaacacgcaaatacccatcaaaagtaagtaaatatantccgaaacatataaaatgcagttaatcctgcagtaaaagaggctattattccaaaaaagggtgaatacaaccaactattactaagtatttcatctttggaccagaagcaagcaagaggtggaataccgcaaagagaaagtgtaccacataaaaaagtagttcttgtaattggaacgtattttcttaaaccacccataagaaccatattctgacttttatctggtgaatatccaacaagaggttccattgaatgaataacggatccggatcctaagaacaataaagctntcgaataagcatgagtgatcaaatggaataaagcagcttgataagaacctatacctagagctaacatcatataacccaattgggacattgtagaat

SEQ ID NO: 462830 - DNA, 651 bp, Sorghum bicolor
tcatcatcaaataagacgtatcttgttcaagccaataaatagagctggggttatagttaaagcaggcagtagaaaaccgaaataactagttatagtaagcatgaaggggttaaattccatttttttttactacactacataatgttggtaaagcacttacctaagtttaagttttaagttatggaaaattcataattcattggttattggagataatactaaaaaacaagatagagtgagatacagaagtgtaaaaaaaaagagaaaatcgattcatcagacggaacatgagtccctaattccgaatcaagagatttgttgtggaatctgtcaattaagtaaactaataatattaagaactagatcatctaacgccattgaaaaatgaaattggattttcgggggaattttggaataaaagataaataaagaatttaatttgaaaaaaaaattctttctatttcggattatttcttttttaataggatggatttcatcctctttttggagcaaacggtcgaatattcccctattccttcttattttaactcattgtattccatatgggataagaggagaagaaaagcatttcacgacccccagggggccccctcaaaaagggaactattccttggatttactttttttttt

SEQ ID NO: 462831 - DNA, 621 bp, Sorghum bicolor
tgcaagttgttcatcatgacattcccaataagattgcccgataatagatcgattcatctaaagcccgcgggtgcggggtccgctcgcaatagtcctattaattccccaggtaaaaaaacattagacattccatcttcggaaacccttacttttgatgttacttggcgtataataatctctatatgtctattatggatctgtaccccttttgatcgatgaggcgtggtggatcttattaaccaaagagatacgactttgggctatggttagctcagctccaatcaagaatccccagggaaccccaagaattcttggtatacgttcattccaatcctcaattctcctttcgagattcggcgatagtgaatcaattgaacgcgcttcgaagatttgttctacttttggaagaccttgcgttatatcactggatctcgatttttcatatataaacgtaactaacctatctcctttgtaaaggatttttccataatgaccatgaacagttgctcctatagtggccaaataaggcttagctgctcttagaacaaaggagtccatattaacaatgaaaatttgaccagatttttttatgtgtgaattaaatagacataaattttcaac

SEQ ID NO: 462832 - DNA, 593 bp, Sorghum bicolor
acttcaaacattttgtcttctccatattaccatatctctagagtcaataattttctatgaggaactactgaactcaatcacttgctgccgttactcaacagttttctgttgaggtctatcccgtagaggtagtcaaattggatcagtgatcgatttctaggtttcgtcgtaaacctaattggttacttccaattacgtaaatcaatagttcaaaccgcactcaaaggtagggcatttcccattgatataggaacttttgtaccagaaacaatagtatctccaattatagcccctctgggatgtaaaatatatctcttctcaccatccccatagtgtatgagacaaatgtatgcatttcgattagggtcgtattctatggttacgattctaccagatatgtctttttgattccgtcgaaaatcgattttacggtataggcgcttatgacctccccctctatgccttgcggtaatgattcctctggcattacgacctttaccacaacggtgccgtccatggatcaatttatttcggggattggatttcacttgcctggctacgggtcccttgcgtgtgctcgggataggtggttt

SEQ ID NO: 462833 - DNA, 512 bp, Sorghum bicolor
ccgttctatatacattcgaaccactcttggtcatatttctttttatagagaaatagaggaagccatacaaggatttagtcgggcctattcatacactatctaaacaaggaagtgaaattcggcgatgcccctttcggggggcattccgatttcgctagtaccatcttttttgccgcgcaaatccagattgagattgaggaaagggagtaaataaagttttcgaatcactgactcaggcccattgtcgaatcctactcagcaattgtcgaatcctactcagccaaaaaagggggtacttatgtatggcagaacgggccaacctggtctttcataataaagagatagacggaactgctatgaaacggcttattagcagattaatagatcatttcggaatgggatatacctcccatatactggatcaaataaagactctgggcttccatcaagccactactacatcgatttctttaggaatcgaggatcttttaacaataccctctaaaggatgg

SEQ ID NO: 462834 - DNA, 595 bp, Sorghum bicolor
  unsure (1)..(595): unsure at all n locations
gcagttgttcatcattcgtgtatacgaaatagtagacttgactaactcaattcttaggaaatcgcgaattagatcgtttgttcttacctcaacaagagaagcacgagccccctcttttacttcttgttcccaattcactactaagcaagttcgaacgaattgactattcgtgtgataaattctttgagttaacttgctattttcatgagaaataaaattgacaagtcgaagttggagattatcctcttcttgcaggagatcctgcgggaaaagtgttgctaaatttctcccttcgtccatttcatatgagactgcaggtcgaaccgaaacaaaatacttttccttgcttttgagaatttttttccgttgaacataaacccaatttttccttttttttgattccttagaatcttttttttctctttctgggggtatcaaactgccacctaatatcttatccggctcttcaggaaaatgaatatctccggaaaagattttgagttctgtatggcttttttttctcttcactcggaccaatccacctagnccacttcttgtattttttgtgagttgggtatcgactccaataatacta

SEQ ID NO: 462835 - DNA, 594 bp, Sorghum bicolor
tcatcacggcatggggatgtcaaaaggaaagggatggagtttttctcgcttttggcgtagcaggcctccctttgggaggcccgcgcgacgggctattagctcagtggtagagcgcgcccctgataattgcgtcgttgtgcctgggctgtgagggctctcagccacatggatagttcaatgtgctcatcagcgcctgacccgaagatgtggatcatccaaggcacattagcatggcgtactcctcctgtttgaatcggagtttgaaaccaaacaaacttctcctcaggaggatagatggggcgattcaggtgagatcccatgtagatcgaactttctattcactcgtgggatccgggcggtccggggggggggccaccgcggctcctctcttctcgagaatccatacatcccttatcagtgtatggagagctatctctcgagcacaggttgaggttcgtcctcaatgggaaaatggagcacctaacaacgcatcttcacagaccaagaactacgagatcacccctttcattctggggtgacggagggatcgtaccattcgagccttttttttatgcttttcccggcggtctggag

SEQ ID NO: 462836 - DNA, 519 bp, Sorghum bicolor
ttgctgtatccaaaacattaactatttatacaaaggagccatcaagcaagtaagctatgccaacgaaaagagtggtcggttaggggtcgcaataaaatactcatactgcttgcgactcgaataacagaagaaagaaattttatttgcgaagcaagatgaaggtctgcgctctgacttatagaattctttctttgacgggggagaaagagctcaagagtataacaataacgaaaagtacgattgcgaatccattctatccaacgaacagcgcttaccttaaccttaccgaaatggatcattctagatatttaaagaatcacagatcgagatcggtatcgcttaaccaaagaaaggaaggacgcttcattgttactagtaatacgagaaagcaaatcatccaacaaaaatccatctctatgataaagacataggggttaatcgctatacagcgaatgacctgataagaatgatttgacaataaattaggaagtagaggagacagaacatatgagtgtatcc

SEQ ID NO: 462837 - DNA, 601 bp, Sorghum bicolor
tgcagttgttctcatgagattaggtagggctaaaataaaaaaaagagtcaaatcgcaccatctctataataagtaaatgcccttttttccccggaggttgtcggaattatttgcaataaaatattggctacaatcgaggaggtcttatcaatgaaatttccatttatacgggatctaggcataattcccaacccattctatatagaattcttttcattctatcacaaaataacataaaaacaaaacactcgattcttataaatcgatccatatgctctaaatggaatggataagagaggtatggattttccgctcagctcaaattgtctccttttccttctgtttggacaagaagagatatgaaatatttgactaagactggatttcattccactttcctatttctcaacaacaacttctctcatcagctatttcgcgttttcaaagtaattaattgccccataccccttttatatttagattgtatggcgtaatgtaccttatgcaaatagaattctagggttcctttattttcttatggaataagaagaattcttccattctctttttatttttggtttccccaaagaaaaacttttcg

SEQ ID NO: 462838 - DNA, 622 bp, Sorghum bicolor
tcatcaccttggaagctcaggcggaagcccgtttacttatgttttctcatatgaatctggtgtctcccgctattggagatcctatttgcgtgccaacccaagacatgcttatcggactttatgtattaacgattggaaaccgtcgaggtatttgtgcaaatagatataatagttgcggaaactctccaaataaaaaaatcaactacaataataacaattattataagtatacgaaagataaagaaccccatttttctagttcctatgatgcactgggagcttatagacagaaacgaatcggtttaaacagtcccttgtggctccgatggaaactagatcaacgcatcgttgggtcaagagaagttccgattgaagttcaatatgaatcttttgggacttatcatgagatttatgcccactatctagtagtgggaaatagaaaaaaagaaatccgttctatatacattcgaaccactcttggtcatatttctttttatagagaaatagaggaagccatacaaggatttagtcgggcctattcatacactatctaaacaaggaagtgaaatttggcgatgcccctttcggggggcattccgatttcgctagtaccatttttttt

SEQ ID NO: 462839 - DNA, 602 bp, Sorghum bicolor
  unsure (1)..(602): unsure at all n locations
tcatcagtttgtatctatttctctttttgtatactagtggaatttcattgtattgggttctttcttagatctaaatggagtggaatagagaaataaaaaaaaggccttttatataaaaatggaagaatagtatgccatatatctcacttggacaaaacaaattcgaagcaattttctcttatcctcgtttgttccttcctttagataaatactcgaaaatccccttacaattgcaaaaaattgcaattggtactcaaaatacttcaattggtacacccaagaaataggccaattcggcagctttttgttcaatttctcgtggagtaaaaaacttctcatcagtacgagtcaagggaatgaccccctggccccggatttccatataaaggatacgacgaggataaagaccctctttaacctgaattctaattgattggatatcccgcacaaggaattgaaggaagatgcgacgttttattccagggaatccccaacgaaaaatgcacactattccctcttttctatcgaatcggtcataaccactgcctacattccatanaatagtgcaccacaaataggagctaatgaataggcccgcgatt

SEQ ID NO: 462840 - DNA, 577 bp, Sorghum bicolor
  unsure (1)..(577): unsure at all n locations
tctaggctttttgataatctatgattaacctctttttataatactccgtaccgggggggaagtcgaatccccgctgcctccttgaaagagagatgtcctgaaccactagacgatgggggcatcactagacgatagcaccgtatacaaccactcgtcattatactataatgatagtatgagcagttttttggaatggggggggtactcttcgaactagatcaaagaaaagagtctttactacttttctgttatgctattttttttagttgatggttaggttaattcacggatcatcccctaccttttaagctttttaaggttaaggaaattcgtttaaagggtatagaataagaatagactaataaaaaggaatctaaattagttcagtacaggtattgatttgattgctataacaggaaaaagagtccaatttcatttttttttgcaattttaactctgggcttngtttagtggtcagaccaaaaatgtgggccatttgcattaaactaagtcataaaattgcaaaaaaaaaaaatggagacattttcaaaaaagaaatgaatgaatttagtagaaa

SEQ ID NO: 462841 - DNA, 544 bp, Sorghum bicolor
tcatcatacagcgaaccaaggtcgaaagggattgaaaaagtcagtcattcacaaccactgaggaaggatgtgctcgaaaagttaaggattagtagttctttttcgaaatccatttcgaaaaagaatggattcggtcttatacatacgcgaggaaggtaatcaaaaaagaaagaagacgagttcttctttcttttatcacttatgatccgtgcgagaggaaagtctcatgcacggttttgcatgagagaaagaagcgaggaatcctcttttcgactctgactcccccactccagtcgttgcttttctttctgttacttcgaaagtagctgcttcagctttagccacgcgaattctcgatattcctttttatttctcatcaaacgaatggcatcttcttctggaaatcctagctattcttagcatgatattggggaatctccttgcttatactcaaacaagcatgaaacgtatgcttgcatattcgtccatagggcaaatccgatttgtaattattggaataattggtggagactcaaatgatgga

SEQ ID NO: 462842 - DNA, 613 bp, Sorghum bicolor
  unsure (1)..(613): unsure at all n locations
gcaagttgttcatcaaggcctttatgatacaatcaataattcgattcattttcaattaggccttgctctagcttccttaggggttattacttccttagtagctcaacatatgtactctttacctgcttatgcattcatagcacaagactttactactcaagctgctttatatactcatcaccaatacattgcagggttcatcatgacaggggctttgggtgatggagctatttttttcattagggattacaatccggaacagaatgaagataatgtattggcaagaatgttagaccataaggaagctatcatatctcatttaagttgggctagcctcttcctaggattccataccttgggcctttatgttcataacgacgttatgcttgcttttggtactccagaaaagcaaatcttgatcgaacctatatttgcccaatggatacaatctgctcatggnaagacgacatatgggttcgatatactcttatcttcaacgaatggccccgctttcaatgcaggtcgaaacatatggttaccgggatggttgaatgctggtaatgagaatagtaattcgcttttcttaacaataggacctggggatttcttggtc

SEQ ID NO: 462843 - DNA, 559 bp, Sorghum bicolor
  unsure (1)..(559): unsure at all n locations
cttttggcacaagtttttttggttctcaaaagaacagtttgaaaatgttcaattgtacgaaatgaatttctagatcctgggatttcttaccatcaagttagaaaaaagcctcgatttctggaattccttatttctatctcatgcaaaagaagaggatccaaggcaaagacgagaacaataaaagcaacaagtccttttaggaggaattgtgggtcttcttaatcctctattgggcacaagaaaaaggcaaaaaagcctttttcttgtgtcgattcttcttgtatcgaagtaagaatcatttttcttcttatttgttttgtcaaagattactatttattctttattcaggtctgtcttttggacttcctttgcttaggttcgggcgcggtagtggacaaacagagggaaagaaagtatggcggnggacaaatttcttgtgagcaaatagaattgcttgactttttcaattaagttcaactttgaacttacagaaattttgtaaaaaaaaatctataccctcccatggaagggggggtttgatttttaggctagttgagta

SEQ ID NO: 462844 - DNA, 663 bp, Sorghum bicolor
tttggcaacgttatccgcagcctctactaggtgaatccaatggaaggtcatcacttgaattaactagtttttgaaatagtctttttttttagcttagcccaattcatgcatgattccggataatcctcttggttggaaaactaaatagttcgaaaggcgtatgaatatacaacctagagttgtaggagagagaatagactatattatggaagaggtaaaatatatatgcattcaggggggcggaatctggttagatctatatccttaatgcctataagacagtcatcttttgtgtggctttctaaggaatgattttagaatcggattcaatagaaaatgagaaaatacgcaaacaaaatagaagaaacaaatgtatatgggattttttttattcctaagttagattcattatctaatccgatatatagaattcccttctatatggaactggattccatatcaagttctatgcagcatattgttatcaattgtatatcttgatttgattcctattggatttggattagttcgatttaataggggttcttcagagtaaaaaaaaggatggaataaaagagtgattggttgaaaagaaagagaaatagaataatgagaatcatatgggattacaaaaacccctaatgattagaaactaaaaacgag

SEQ ID NO: 462845 - DNA, 269 bp, Sorghum bicolor
  unsure (1)..(269): unsure at all n locations
agccagnnccaanagaccgggcccgnncgcgngcanccagcaggaanggaacccgcaaannnaccaannangagnngggcgccccaaccanncagccanggangcnnaacagggancancgnacancgnaaanaaccaannnncananagaaagacanancanagaaaaaggaaancgaaaananncggagaaggcaaananncggagangacnangaaaaaaccncncngganccccgaanggaaagagaganngagagggancaaga

SEQ ID NO: 462846 - DNA, 592 bp, Sorghum bicolor
gcaagtatttcatcatattcttaccaatataactaggaagccccaaccgctaagaatcctaatgaacctagaaaaagaatacaggcccagaaaaattacctctttttcgagaaccttttagaagttctatccatatgtgttctgatcgccaattcatattagatatactaaatccagtagcggtcaattgaaattgagagaataagctaaatgatttttactttactttttttgattctgaaatagccttcagtagctagtactcctgtgaaataattggttagatacattgactttctattcaaaaaaattagtggatccacttaaaataaaaaaaaactcgctatagtcggctacgcatatgcatgcatttatgctcgtagcttatatctgcatccatagacgttttcatttgtgtgtagaaagagctacataccctatcatattatactacttacacaaaaaaatatctgtattatgatcctggaaatacattgagaaaatttggcccccgcgtttctagacaattttatttttttgcacataaagaaataagggagtcatttgaattgccggaaatactaagcctact

SEQ ID NO: 462847 - DNA, 409 bp, Sorghum bicolor
cttgggggcccgctgcagttgttcatcattcctatgttatattattccactatcaaccatgaattgatttgatagatccaatattcataatattgaattgattcagtattatcagaatgcaagtcctccccttgaatttacaggatacccctttttcctctccatgggattacatcccgagttattgtgaaaaaaaaaaataaagaggttatggaagtcaatattctcgcatttattgctacagcattgttcattctagttcctactgcctttttacttattatttatgtaaaaacagccagtcaaaatgattaattggaattccaattaatcattgaagaaatgaaaaagggattaaagaaaataaaaaatccaagtcttaaatgaaagggtctggttggaatcataa

SEQ ID NO: 462848 - DNA, 174 bp, Sorghum bicolor
  unsure (1)..(174): unsure at all n locations
tcatatataaacttaactattttatctgcttaaaaaaggagtgagcgatcatgaccattaacaggtgctcctagagcaaccaaataacgcttatctgcaataaaaacaaaggagaaaatatacacaaacaaaaatgcaccagaccatgggaatcngggaaaccacgnatgtaaa

SEQ ID NO: 462849 - DNA, 585 bp, Sorghum bicolor
tggggaagaggactgaaacatgccactgaatgactctactgagacaaagggagggggtgtcaaaaaggtagaggaggtaggatgggcagttggtcagatctagtatggatcgtacatggacgatagttggagtcggcggctctcctaggcttccctcatctgggatccctggggaagaggatcttgtttttccttgcgggggggtggatgcactatctcccttcaaccctttgagcgaaatgtggcaaaaggaaggaaaatccatggaccgaccccattgtctccaccccgtaggaactacgagatcaccccaaggacgccttcggcgtccaggggtcacggaccgaccatagatcctgttcaataagtggaacacattagccgtccgctctccggttgggcagtaagggtcggagaagggcaatcactccttcttaaaaccagcattcttaagttaagatcaaagagtcgggcggaaaaaggggagagctccccgttcctgggtctcctgtagctggattccccggaaccacaagaatccttagaaagggattccaacttaacaaccttttgttttgggatttt

SEQ ID NO: 462850 - DNA, 601 bp, Sorghum bicolor
gcagttgttcatcacacttaaatggtatatcaattctataaattggatatagcaataaataaatcagcgaaaggcttttattttagatagaagaaatgtttcttctatctaaaataaaagaatgtacccttctatccaaatccaatttgcatcgataaaataaatccaaattccagattccagcagtagatgaataattgcaaatttttgtgtgtacgagagtagaataacttaaaaataactgacataattttttatttttcctgatcagaaaaatacatgaaaaagaaaggaggtagaaaaatttgttgatttatggttaaagaagaaaaacaagaaaacaggggttctgttgaatttcaagtattcagtttcaccaataagatacggagacttgcttcacatttagaattacacaaaaaagatttttcatcggaaagaggtctacgaagacttttgggaaaacgtcaacgtttgctggcttatttggcaaagaaaaatagagtacgttataagaaattaatcagtcagttggatattcgggagaagtaatttaatcgttcgaatttttttcctattttattagtagtcttatagtagt

SEQ ID NO: 462851 - DNA, 601 bp, Sorghum bicolor
catacatctaatttatatagtactaatttcatttttaccagatcgaaaatttttatgttgaaaaggcaaatttagagatccaatgtcacattctgtaaaaatttatgatacatgtataggatgcactcaatgtgtacgagcttgcccaacagatgtattagaaatgataccttgggatggatgtaaagccaagcaaattgcttccgcgccgagaaccgaagattgtgtgggttgtaagagatgcgaatctgcttgcccaacggattttttaagtgtccgcgtttatttaaggtctgaaacaacccgcagcatggctctatcttattgatacgttacaaaaaactccacttgaatcgtctgattcctctttaccgaagaagcctgtgctcgaaataatcgagcatgggcttttctggtcaaaacgtatcttgtctttattactttatcatgagttattttccttggttaacaatacttgttgttttgccgatatttgcaggttcattaattttctttttacctcataaaggaaataaaatcgttaggtggtatactatagctatttgtttattagaattccttattatgacttatgcattct

SEQ ID NO: 462852 - DNA, 668 bp, Sorghum bicolor
  unsure (1)..(668): unsure at all n locations
gcagttgttcatcactcccagggcatacgatagtttgattatctgtggacgatttctttctcgttcaatgccctttttcagtcgtctcgaagatagaaattttgcatttttatctatggggtcacaaccaaggtcgtgctaaatccacgaatttcatttaattcatttttcttatactatagaaaagaaataaaagaaaagaaataaagaaataaacatttgaattcagcattattccatgatttctatttcaaagcctattttttaagggaaaacccctcttttctcattcgctctctattgcatgggtggaagaacaaaaatagaataggattctgaaaaaaaaagaaagatattgaaaagaaaaattgacttttgaaaccctttattcattatgtgtaacggaaaagagttgcgatttcttcttattcctatagaacgtctagtaacaagaatatgaaatcgtaaatagcgaaaaattcttgccttgcgcgatctaagtctaaggaaataaaaaaatgcgcttatacaccaatttcatccacatcgaatttatatatcagaatagcggatagaggtatcattcaaggggtcaggnctacttactttatctttctttccaattttattgtgggtttgataagaaccttttttgttttggggtaaaa

SEQ ID NO: 462853 - DNA, 597 bp, Sorghum bicolor
tcatcattaggataaataaatatttattggatacctaacttacccatgtttatttttatttttgacctaaaccctactgctgccccgctttctatctttctatgaaagagtaaggaggtcttatccacaatccaaaaattgatttttgatcagcctattcaatctaattctcgacagaatcagtagcctttactttagtgtatgtaggtagcataagatatactaagtgtatgtagtaagatgtacgataaataaaatgtatgataattaggaagtctttctatttcttcgcaaagtcccttcttcaatcttagattgaaaaaagactgccccttagggacctttggctacgaagatttctgacatcttagtctcgtagttttaaattcccgaatcgaatcgatttaaattaataaaagaataaggaaacgctacctcatccctattggtaaccgtttgggccactgcccacaaaacaaaccctagtttgagggtagaactatggtatggattctcaaaatccagtatcgccaaacctagttactctcgtgccccaacttaggggggtacgaatttgtcgagtttgatcaggactat

SEQ ID NO: 462854 - DNA, 636 bp, Sorghum bicolor
catacggtaagtccaacattgattccttcggacgtgtcaattggacaaatacgcccatagtgactcggatgaatatctcggctacgaaaacttgcagttctccccgtcaatcctccaggacccaaacaactcacttttcgcccatgaaccgtttgtgtcaatggattggtttgatcaaaaacttgagctaaggggtatgtgccaaaaaaggtctcataagtagtgattaataaaatcgaagttgaagttggagttaccaaagtttgtggagtcggtttcgattgacgtatgaatactctacggatagttttttgaaccgcatgttgtaaacggccaagagccagtccgaattgatcttgtaacagatctgcaaccgaacgaatacgtttatttttcaagtgattcatatcgtcatcgtcaagtatacccgttccaaatttcattccaatcaaatgatccgtagcggccaatacatctcgtggtaacaagaatgtattgttctgagggatatcaagattcagtctccgattcatatttcgtcgaccaactcttcctaattcacatttttgttgaaaaaatttcttttgtaattcctcgcataaggactccgaaaataccaggtccccacctacacaa

SEQ ID NO: 462855 - DNA, 123 bp, Sorghum bicolor
  unsure (1)..(123): unsure at all n locations
ttggaagnaaaaaaccagaattttcttcttttttttattaacaggaagagaaaagaatataattaaaatggaattggcaatataatttttatgcaggtgtggaaatgaaagaaaaaggaaggg

SEQ ID NO: 462856 - DNA, 616 bp, Sorghum bicolor
tcatcaattcctagttacgtatttacttacggcgacgaataataaaactatcactatattttttccttttcctagttcttcttccaagcgcaggataaccccaaggggttgtgggtttttttctaccaatgggggctttcccttcaccacccccatgggggtggtccacagggttcataactacccctcttactacggggcgtttacctaaccaacacttagatccggctctacccaaacttttttggttcaccccaacattacccacttgtccgactgttgctaagcagttttgggataccaaacggacctccccagatggtaatcttaaagtggccaatttaccctcttttgcaatcagtttcgctacagcacctgctgctctagctaattgcccaccccttccacgtgtgatttctatgttatgtatggccgtgcctaagggcatatcggttgaagtagattcttcttttttatcaaaaaaccccttcccaaactgtacaagcttcttccaaagcatacggctttctagatgtatatgacgatctctagacagatggatcttatttgaatcgtatgatggaagaccacatggaggggtatatagaaaaggaat

SEQ ID NO: 462857 - DNA, 544 bp, Sorghum bicolor
acttttatggatttgctctcatctttagaccccaaaaagcgtatattgatagtaacctaataaaataaaaaccaagcaaacgctctttttcctaaattaaaatatgggatcctttttatttaagatcctcttttctccatctcatttctacttctactgcttattgggatgtctatgtgacccatagaaagttggtcatataatacatacataattgtatgtataactataagaaaaaggaagggaaattggataagataagaaagattttggattatacatatagaaaaacaaaagtagaaaagaatgaaaaatagaatagagggggtttcgaatccaatcaaaaaacccattttggtcttagtatggataagagatcttcctatgttatattattccactatcaaccatgaattgatttgatagatccaatattcataatattgaattgattcagtattatcagaatgcaagtcctccccttgaatttacaggatacccctttttcctctccatgggattacatcccgagttattgtgaaaa

SEQ ID NO: 462858 - DNA, 471 bp, Sorghum bicolor
  unsure (1)..(471): unsure at all n locations
tcatcatgcgtattcacttaattttgttaggtctaggtgcttttcttctagtactcaaggctggggatttggcggcgtatatgatacctgggcccccggggggggggatgtaagaaaaattaccaatttgacccttagccccggtgttatatttggttatttactaaaatccccttttgggggagaaggatggattgttagtgtgggggggggagaanatataattggggggcatgtatggttgggttccatttgtgtacttggcggaatttggcatatcttaaccaaaccctttgcatgggctcgccgtgcatttgtatggtctggcgaagcttacttggcttatagtttaggngctttatctgtttttggttttatcgnttgntgntttgtctggttcaataatacgggttatncaagngagnntacgggccccctggaccaaaagcttntaagctcaancatnnactt

SEQ ID NO: 462859 - DNA, 672 bp, Sorghum bicolor
gcaagttgttcatcatctttgtaagataaagaatcagagagatatggattagaaatcaatttccccggggctggttatcctttatttctatggataataatttttttttattccataaaaaataatggatttagttcatattcactaagccctaaatttttgggccgagctggatttgaaccagcgtagacatatcgtcaacgaatttacagtccggcggagtaaccgctcgggcatcgacccaggaagaatttattctaggctttttgataatctatgattaacctctttttataatactccctacccccaggggaagtcgaatccccgctgcctccttgaaagagagatgtcctgaaccactagacgatgggggcatcactagacgatagcaccgtatacaaccactcgtcattatactataatgatagtatgagcagttttttggaattgtcaatatactcttcgaactagatcaaagaaaagagtctttactacttttctgttatgctattttttttagttgatggttaggttaattcacggatcatcccctaccttttaagctttttaaggttaaggaaattcgtttaaagggtatagaataagaatagactaataaaaaggaatctaaattagttcaggacaggtattgatttgattgctataaca

SEQ ID NO: 462860 - DNA, 584 bp, Sorghum bicolor
  unsure (1)..(584): unsure at all n locations
aatactacaattcgactactcaatcaattggtagtatccctagagtccactcctcccccatactactagcgaaagagaaaatgtaaagactaccattaaagcagcccaagcgagacttactatatccatgtaaattatgtctcctatttctatgaaagaattcttctactattgatcaataatcatagtggaatcaagggtacagagtcaaaaggccattctattctgccctaagactatggatgaacccgttaaaggaatttactcctaacaaattcttatatgatttctggtagaattggagagcattaagtagaaatatgatacatcgctctttccctaaaaaagagtaggggatgctctgaatagaagacgcgggaatagagagattttttctttcgtttgttaccttttttataagcaaaggacgtaagaatataccataaaattaggataaataaatatttattggatacctaacttacccatgtttatttttatttttgacctanaccctactgctgccccgctttctatctttctatgaaagaaaaaggaggtcttatccacaatccaaaaattga

SEQ ID NO: 462861 - DNA, 596 bp, Sorghum bicolor
tcatcatgcagtccttaaccatctccctgagaaaagtagacagtaaaagccaaaatagactaaatatagcctgaatgatcctaaaaacccctcgaaggagataataaagaacctaaagcagacggtatcctactgcaagggtggtcttaagaatccaaaagaggttgctcagaagagatagatgtatcccaacctctattgctctcgcgtggagccttttttttacgcgacaggaaaaagtgactacgaattcccctttttgtttgcgaatccctgtttgtatcctttgagcgcacgcccataagtagcgatcaaggaaatcgatcaaacgatcccaataccgtgaaagagaaacttcccagatccagggaagcttatcataaagggcttcaacaaggggttttattcgttctttgagcaaaaagataaagatcggatagattcgaaccgcaattgcaaaggtaataactactatgccagcccaaatcatgatcttcaccaacttggatttggttctctcgcgaaaatcgcgagttgcagagatgagaaccctgaaaagcaagaacccgaataagaaaatagaaaccgaggaaacc

SEQ ID NO: 462862 - DNA, 636 bp, Sorghum bicolor
ggactctagagaaagactcagaggaagaatatgggagcctagagaacggatatgggacccgagagggagagggcgaatatgaaatcctagaggaagactcagaagaagaatatgggagctctgaagatggctcagagaaggaatatgggactttagaagaagactcagaggaagactcagaggaagactcagaagacgaggtgggagcccggaggaagattctatcttaaaaaaagagggttttattgagcatcgaggaacaaaagaatttagtctaaaataccaaaaagaagtagatcggttttttttcattcttcaagaactgcatatcttgccgagatcctcatccctaaaggtacttgacaatagtattattggagtcgatacacaactcacaaaaaatacaagaagtcgactaggtggattggtccgagtgaagagaaaaaaaagccatacagaactcaaaatcttttccggagatattcattttcctgaagaggcggataagaaattaggtggcagtttgatacccccagaaagagaaaaaaaagattctaaggaatcaaaaaaaaggaaaaattgggtttatgttcaacggaaaaaaattctcaaaagcaaggaaagttttttgtttcg

SEQ ID NO: 462863 - DNA, 622 bp, Sorghum bicolor
tcatctactgctggaatctggaatttggatttattttatcgatgcaaattggatttggatagaagggtacattcttttattttagatagaagaaacatttcttctatctaaaataaaagaattttgctgatttatttattgctatatccaatttatagaattgatataccatttaattgatatcatttagcaaaatggggcgcagcatatgcatccatctttgggctcgagaatttcacgggatagagatatagtataagaaataggctattaagtaactctaaatgaattgtggatacatctgtatccttaacatactgaaacgactgccattattcgtatcaaaccaatagcgattcataaaagctaaatcttgtaatcaatggtgtgccaataatgaatttttttgcatatgtattaagacgcttggtctgatttcgaaattgtccagagttttttatgttgttttcattgcaaaatgatggatctccttccgtaactttccaattacgagtacgagaattgaaagacatgaaaattctcaattctctacggcgtctaggagatagatcgaatattctcaggaacaagaaaatcagaagaatctttttctctattcact

SEQ ID NO: 462864 - DNA, 630 bp, Sorghum bicolor
  unsure (1)..(630): unsure at all n locations
aaatccaataggaatcaaatcaagatatacaattgataacaatatgctgcatagaacttgatatggaatccagttccatatagaagggaattctatatatcggattagataatgaatctaacttaggaataaaaaaaatcccatatacatttgtttcttctattttgtttgcgtattttctcattttctattgaatccgattctaaaatcattccttagaaagccacacaaaagatgactgtcttataggcattaaggatatagatctaaccagattccgcccccctgaatgcatatatattttacctcttccataatatagtctattctctctcctacaactctaggttgtatattcatacgcctttcgaactatttagttttccaaccaagaggattatccggaatcatgcatgaattgggctaagctaaaaaaaaagactatttcaaaaactagttaattcaatgatgaccttccatggattcacctatataggctgcggctaacgttgcaaaaataagagcttgaataccggttgtaaataatccaagaaacatgaccggtatagggactactaaggngactaaagaaacaagaacaccaacgactaattcatccggcaatatatt

SEQ ID NO: 462865 - DNA, 574 bp, Sorghum bicolor
tcatcatatacgttttatgagacactaataaacactattatttttatatattattcgtcggtcccgggtcaattacctaaaaaatgagggatattttcttgctaggattcgagacatgcagataatatagaatccaaaaaatgcattgatcattacatagaattctattaagatattatatgaaagtcgaatttcttccattctcattggagggggcgaatacaaggaggtattttgtgtttgggaaagtccgaagaaaaaaggatttggaatctaccttttcttttgctttttcccttagaaaaataactcaatcaaaatccaattatctactctacaagaatgaaatgcttgttatgcctaatatacttagtttaacctgtatctgttttaattctgttctttgtccgactagctttttcttcgccaaattacccgaagcttatgccattttcaacccaatcgtggatgttatgcctgtcatacctgtactcttttttctattagcgtttgtttggcaaggctgtgtaagttttcgatgaaatttttactattctgcctgccaaattgaatg

SEQ ID NO: 462866 - DNA, 556 bp, Sorghum bicolor
  unsure (1)..(556): unsure at all n locations
tggtcggtccgtgacccctggacgccgaatgcgtccttggggtgatctcgtagttcctacggggtggagacaatggggtcggtccatggattttccttccttttgccacatttcgctcaaagggttgaagggagatagtgcatcaagctattcgcaagggccaacttgatcctcttccccagggatcccagatgagggaagcctaggagagccgccgactccaactatcgtccatgtacgatccatactagatctgaccaactgcccatcctacctcctctacctttttgacagcccatctttttgtctcagtagagtctttcagtggcatgtttcaatcctcttccccattacttagaaaaagtgagccaccggttcaggtacaagatactatcattaccgnctggacaattagacagccaacccgtaatccccacgacccaattgcaagagcggagctctaccaactgagctatatcccccccgagcctagtggagtatgcatgaangaataaaatgcttnttntaattntttttcctggcgcaantgggccat

SEQ ID NO: 462867 - DNA, 574 bp, Sorghum bicolor
gcattatttcatcacacgcggtaatgatagtatcttgtacctgaaccggtggctcactttttctaagtaatggggaagaggactgaaacatgccactgaaagactctactgagacaaaaagatgggctgtcaaaaaggtagaggaggtaggatgggcagttggtcagatctagtatggatcgtacatggacgatagttggagtcggcggctctcctaggcttccctcatctgggatccctggggaagaggatcaagttggcccttgcgaatagcttgatgcactatctcccttcaaccctttgagcgaaatgtggcaaaaggaaggaaaatccatggaccgaccccattgtctccaccccgtaggaactacgagatcaccccaaggacgccttcggcgtccaggggtcacggaccgaccatagatcctgttcaataagtggaacacattagccgtccgctctccggttgggcagtaagggtcggagaagggcaatcactcgttcttaaaaccagcattcttaagttaagatcaaagagtcgggcggaaaaaggggagagctccccgttcctggt

SEQ ID NO: 462868 - DNA, 605 bp, Sorghum bicolor
  unsure (1)..(605): unsure at all n locations
actcttcaaataggaatccattttctaactgtgctttcgtgctttggtgagtggggcgagatcctttcgatgacctatgttgtgttgaagggatatctatatgatccgatcgattgcataagacccgcggtagcaatagaacggggaaagtatacagaaaagacagttcttttcaatttcgattatctatatattagttgggggctatttctagatatctatttctatatatctatatattagtattaatatctatatattagtattagttatctatatattagtattagttagtagtactattctattagttagcgatcccggctctgtgagttctttcttccgtgatgaactgtcggcaccagtcctacattttttctctgtggaccgaggagaaagggggctcagcaggaagaggattgtaccatgagagaagcacagaggtcaacccgcttcaaatatggaacatggattctggcaatgcaacggaggtgggtcctcatatcgatccgaatgaatcagnctttctacagaggtcaatctttgcctattaggcaagaggatagcaaggtcgaaattctgncttggaggacatggattctatt

SEQ ID NO: 462869 - DNA, 574 bp, Sorghum bicolor
aaacaaaataagaaaaagaaaaaatactggaattctggatttttcaaatttctgtcatgggaatattccaaaattaagaatgggtttagctacttaaattcaaaaagtgaatcaaagaatttcagtatctagttattagttaaaaaaaaatatatttattaaaatacaaactaatcatttttgtatttctttctgttaaaataaaggagctctgttgtttcgtaattgattgattggattccaaagaaaacctatatttataggaaattctcgaatattgcttatttcatataaaaggaaatcctaatgactagaattctctaagttttagaatgtcttgtttaagagacttggaattcaattatgcaatagctttctgaacttaattaactatttgaattgaattttaccttccttctttttatgcccccctcttatatgagggcttatcccccataccatatatttatatatggagtatatttgatatataaattgatttaaatagaaaatcttaaaaaacttttgtcttatccccattagacaaaatgaactaaagaagaatttagaattt

SEQ ID NO: 462870 - DNA, 680 bp, Sorghum bicolor
gcaagttgttcatcaggtcttgaccattccgttccctttttcaaactccacttcttttcatatagcatccctaatcaaagagagaacaatatccatttcaaaacatttctaacggattccttggttcggaccgacgaagtaatggcactcgattattatcaacccgactgcaatctttttctgtcggtaaggattgcaccagagcaccttctacttctaataggccatgaactatagatagagaagaatcattctgagcgagtccataagaagcgacccactttttcatcggttccgggggaagaccaaagatcttgcgcgaccggtccgccagaaaaactcaaaagagaaagaagtctcgttaatctcttcatgctcgttccaagttcgaagtaccgtttggccaaagaaaaagccgcttcctgacacgattgcctctttatatagatagatataggatctatggggttattacttagaagtctattttgtacaagatcccctcctatctgatagaaaagggtcccatgatcccgagccggtcttatcttggctcgcaaaccccaagtttgtctatgaagagctaatctaattgtattagtttctataatggatttcttatgtggaatactaatggatagggccttggtgctaagtgctacaagatctaatgcactgga

SEQ ID NO: 462871 - DNA, 567 bp, Sorghum bicolor
  unsure (1)..(567): unsure at all n locations
agggattgagaatatcggtcgcgtagtgcaagtgggggatggggtgctcgtattataggtcttggtgaaataatgtcaggtgaattagtcgaatttgcagaagggacgagaggtattgctctgaatttggaatccaaaaatgttgggattgtattaatgggcgatgggttgatgatacaagagggaagtttggtaagtgggaacaggaagaattgctcagatacccgtgagcgaggcttacttgggtcgtgttataaatgctctcgctaaacctattgatgggagaggcgaaattgtcgcttcagaatctcgcttaattgaatctcctgctccgggtataatttctaggcgttccgtatatgaaccccttcaaacagggcttattgctatcgattcgatgatccccatagggcgcggncagcgagagttaattattggggacagacagactggcaaaacagcagtagccacagatacaattctcaatcaaaaagggcaagatgtaatatgtgtttatgtagctatcggtcaaagagcatcctcccctgctcaagtagtaacaacttt

SEQ ID NO: 462872 - DNA, 570 bp, Sorghum bicolor
  unsure (1)..(570): unsure at all n locations
gactaatccattccaatatctttatttcgagaagcaatgcgtgntgaaccaatatatatatcgtctgctaatacacgaccaattagtgtttggacaaaaagtttttccgtcatcccattttgaggactcacagaaataccttggatagtaccacaatctcttctacgcacaataatattttgaactacgggggggggtctacntgtaanatagccagcatccactgttcgtacagcagtatctacaaccccttttcgggctccgtagcaggaaattatatattctgtcaaagaaagtccctcgcgtaaattgctttgaataggtaaatcaatcatttgtccttgaggatccgccattaaccctctcatacctactaattggtgtacctgagatgcatttcctttggctcctgaaaaagaaattagatagactggattagaaggatcccgtattcgaaaattcgaattcatttctttgttcaaatatttacttgtagcataccatatctcaacggattggcgtaatttttctaccgcgtgtacagnttcattataataanggttctccaaa

SEQ ID NO: 462873 - DNA, 585 bp, Sorghum bicolor
gcagttgttcatcatggagataagcggactcgaaccgctgacatccgccacagggtaaaccaccgcctctcaggcctccccgacgggttctaccatagaggacaacgataggcaataactcccccccgaacacagcttacaactttcatcgtactgtgctctccaaagagcaactcttctcaaaatcccaaaacaaaaggtgctgagttggaatccgggggtaaggattcttgtggttccggggaatccagctacaggagaaccaggaacggggagctctcccctttttccgcccgactctttgatcttaacttaagaatgctggttttaagaacgagtgattgcccttctccgacccttactgcccaaccggagagcggacggctaatgtgttccacttattgaacaggatctatggtcggtccgtgacccctggacgccgaaggcgtccttggggtgatctcgtagttcctacggggtggagacaatggggtcggtccatggattttccttccttttgccacatttcgctcaaagggttgaagggagataatgcatcaagctattcgcaagggccaacttgat

SEQ ID NO: 462874 - DNA, 578 bp, Sorghum bicolor
tcatggtatcattatgaatgtacaagcctaaactgtgaaaacccagaaatatacatacccagttaaggtgggatatgattgcatcgcggtgtctaaggacgcgatctaatagatcgttgtatcgagtagttggatcatagtctcttaccataaaaatggctgcatgtgcagcagcaccaactattagaaatccgccaatccacatgtggtgtgtgaacaaggaaagttgtgtaccatagtcagtagctaggtatggataggggggcatagagtacatatgatgagctacaacaatagttgtagagcctagcatagctaggttaagagataattgagcgtgccatgacgttgttaggatttcatagagacctttatggccttgtcctgtaaatgggcccttatgagcctccaaaatatctttaagtccatgaccaataccccaattggtcctatacatatgaccagcgatcaggaaaagaatagcaatagctaaatgatggtgtgcaatatcgctcaaccatagaccaccggttattggatctaggcctccgcgaaaactaaaaaattccgcatatttg

SEQ ID NO: 462875 - DNA, 611 bp, Sorghum bicolor
tcatcatactaggaggtctaggagtagtattacttaccaacccaatttattctgccttttcgctgggattagttcttgtttgtatatccttattctattttttattaaattcctactttgtagctgtcgcacaacttcttatttatgtgggagccataaatgtcttgatcatatttgctgtaatgtttgtaaacggctcagagtggtctaaagataagaattattggacgattggagatgggtttactttactcctttgtataactattcctttttcactaatgactactatcccagatacgtcgtggtatggaattctttggactacaagatcaaaccaaatagtagaacagggtctcataaataacgttcaacaaattgggattcatttagcaaccgatttttatcttccgtttgaactcatttccctaattcttctagtttctttaataggtgcaattactatggctcgacaataagaaatacttagaatgagtcaaaattcttagaatttcaaatataaaataaataactaaagaatcacaattttgatttagtaaaacccatctactgccaacacaacaaaagagaaaagaaggtatttggttggg

SEQ ID NO: 462876 - DNA, 638 bp, Sorghum bicolor
tcatcaacacacaaattcttccagacttttggtagagtctagatagaccaccactgatcctcaaaggggatgaatggaaaaaatagcatgttcgtaataaaatcaatttctttttttttataaaaaaaaagaacttgattttctggttctagtgagataaatggatagagcctgactctaattctggtaaaataaaaaaaaaatcacgagctgaggcgtgttaattggttaattggaatgattccccgatctaattagacattaaaaatagattagcgcctaatgcaaggaaaggttaggttttcctatgagtggaccctttactttttttttagaactcctaattattcttgattattgattgataagggatcttatgacttgaatgtgtgaaagaaacactctattgataaagagactgtattccaaactcaaaagatcgattggcctgcaaaaataaaagattagttcttgactgatttgtaattacaacaaacataaactaatctgatagaaaaggagcggataaagttctatggattataccccctttctttcctgggtttgtattatgcaacaccttgttctgaccatattgcactatgtatcatcattagataaactcaaaaatgcttttt

SEQ ID NO: 462877 - DNA, 625 bp, Sorghum bicolor
tcgagctcgactgcaagtagttcatcaagaattccagtattttttctttttcttattttgttttttgaattcctttagagagagataagaataggtttggtgaatcggaaacaattttagagaaaaattgaactataaatttaaactaaaaattgctatttcttttcttatggaacatacatatcaatatgcctgggtaattcctcttctcccacttccagttattatgtcaatgggatttggactttttcttattcccacagcaacaaaaaatcttcgtcgcatatgggcttttcctagtattttactcttaagtatagctatggtattctcacttcacctgtctattcaacaaataaatggaagttctatctatcaatatctatggtcttggaccatcaataatgatttttccttagaatttggatacttggtcgacccccttacgtctattatgttaatactaattactactgtaggaatcttagttcttatttatagtgacgattatatgtctcacgatgaaggatatttgagattttttgtttatataagtttttttaatacttccatgttgggattggttactagttccaatttgatacaaatttattttttttgggaa

SEQ ID NO: 462878 - DNA, 432 bp, Sorghum bicolor
  unsure (1)..(432): unsure at all n locations
catcaatattcaccagataaaagtcagaatatggttcttatgggtggtttaagaaaatgcgtgggcaattacaagaactacttttttatgtggtacactttctctttgcggtattccacctcttgcttgcttctggtccaaagatgaaatacttagtaatagttggttgtattcacccttttttggaataatagcctcttttactgcgggggggactgcattttatatgtttcggatatatttacttacttttgatgggtatttgcgtgttaattttcaaaattacagtagtactaaagaaggttcgttgtattcaatatccttatggggaaaaagtatatccaaaggagtcaatagggattntgttttatcaacaatgaaaagtggaggtncttttttttcacacaatatacccaaaattcctncctatac

SEQ ID NO: 462879 - DNA, 404 bp, Sorghum bicolor
  unsure (1)..(404): unsure at all n locations
gtacagctgntcatcattactttgcttaggttcgggcgcggtagtggacaaacagagggaaagaaagtgtggcgggggacaaatttcttgtgagcaaatagaattgcttgactttttcaattaagttcaactttgaacttacagaaattttgtaaaaaaaaatctataccctcccatggaagggtggttttgatttttaggctagtttttgttgttgggggggggggggttattagtttattactctaaactaaatcaaccatttgcaggatacttccttcatctaataaaatactgnatcctctcccctctttcttgttgcttcataagagtgaatccattctatgggccacaggcggcggctctaaatcgaccgacggattgcttcactcactaccatgatc

SEQ ID NO: 462880 - DNA, 481 bp, Sorghum bicolor
  unsure (1)..(481): unsure at all n locations
gtacctagttcctcatctctaggctcccctattcttcctctgagtctttctctagagtcctatattcgtcctctaggatcccatactcatcttctagggtttcatattcgtcctctagagtcctatattcgtcttctaggatttcatattcgccctctccctctcgggtcctatatttgttctctgggctctcatattcgtcttctgagtcttcctctcgagtcctatactcttcctctcgggtccgatattcttcctctagggtcctatatctaaatttaacaattcctgaaccccttttatcttttctgtatcgtggatcgtcaaaataagcaaaaatagtatttctacgtaaaacacccataaagggtatttccattgaaatacccaaacaggatattcnctctttttcttgttcttgatgatattggaatggaacgggaaacctatttcttcgctttttcgccaacaaancgaatta

SEQ ID NO: 462881 - DNA, 559 bp, Sorghum bicolor
  unsure (1)..(559): unsure at all n locations
gtacatatttcatcatcatatcatccctacatagtgttttgatctaagattgcaattcttccatgtttccgcagtagcatattgttccatggagctagggtccaaaataggaatcaacaagtgtttccacgactctaccgcccggccaatcctgttccactgaatcccctccctttttcatggccacatatctttacggctaaggagtgggaaatctttctcctgttacacaaatgaaatgtttcatttcatccgggaaaagccacctctttctccacaaacaatgtctttgtcatttgatccaggagccttccgttagataggaacagctttgctaaatactgagaactctcggatagagtattagaatgaaaagaccattaattatataaggaagaacccagggttctagcccattcccattcctaaatcactaattcgtagtgcttttgcctttcttgcgtactcctgatgaaccagntgctagccatatgtttaggaggcttttttctccaggtactggtactaagccggtttgccatctcttcattttcatctg

SEQ ID NO: 462882 - DNA, 466 bp, Sorghum bicolor
tcatcacgtccatgtacgatccatactagatctgaccaactgcccatcctacctcctctgcctgtgggtgacagcccatctttttgtctcagtagagtctttcagtggcatgtttcagtcctcttccccattacttagaaaaagtgagccaccggttcaggtacaagatactatcattaccgcctggacaattagacagccaacccgtggtggggggcgacccaattgcaagagcggagctctaccaactgagctatatcccccccgagccaagtggagtatgcatgaaagagtcagatgcttcttctattcttttccctggcgcagctgggccatcctggacttgaaccagagacctcgcccgtgaagtaaataatcgcccctacgatccaaccaattgggagagaatcaatagactccttttcgggagcgattcatccttcccgaacgcagcatacaactcccc

SEQ ID NO: 462883 - DNA, 490 bp, Sorghum bicolor
gtacagttgttcatcatatcgtacttttgccctggggagtctctttctcttttaacaaatgtctggaactttggattaagaattggtggaataccaggcaatccgaaactttcttaactgatattcaagagaaaaggattctagaaggattcatagaattagaagaactttttctcttggacgaaatgataaaagagaaaccgaagacacatgtacaaaaacttcctataggaatacacaaggaaataatacaattggccaaaatagataatgaggatcatctccatatcattttgcatttctcaacaaatataatctgtttggctattctaagtggttctttttttctgggtaaagaagaacttgtcattttgaattcttgggttcaggaatttttctataacttaaatgattcaataaaagctttttttattcttttagttactgatttttttggtggatttcactccaaccgcggttgggaactact

SEQ ID NO: 462884 - DNA, 536 bp, Sorghum bicolor
  unsure (1)..(536): unsure at all n locations
atggtacagttgttcatcactttcaaagcgatggataccttatagatataagtagataaaactagatataaagaaggtctaaataaaataaaaaagaagaaaaatagaaagagaaaaaataagttaagaaatgcagtaattcttctttattcttctaattgattgcaattaaattcggctcagtcttttttttagaaaagattgagccgaatttaaatagatcttgatacgatcatgagacttgacaaatcgagattcttctattctatatatctagaatatagaaaggtataatacaataaacaaatataaataaaaatatagtattatcgtacgataatggaatcaaatacgcagtatttacagaaaagagtcttcgtttattgggaaagaatcaatatacttttaatgtcgaatcgggattcactaagacagaaataaagcattgggtcgaactcttctttggtgttaagggagtagctgngaatagccatcgactacccgggaagggtagaagactgggacctattctggga

SEQ ID NO: 462885 - DNA, 409 bp, Sorghum bicolor
  unsure (1)..(409): unsure at all n locations
atcactgaaattactatccagccatatttgtatatgaagagcgcgggttgggttataccccacccaattagaattaggggaaataaaacataaatgtagaaagttctcatcataagatcagccaatagaagaaaaaagtccctaattctgcagaacattctgagcacgtgaaaagtgaatattctatatataaggggggggtttatcatttttttaacagcanttcttattgcccctttggcctttttggcccattgttgtatccgattcaacaattgatacatatttgttctgctcttaaaaaaaaaaggaacttccgttccgagctttggtttggtgagtcgnacaagatcactgggacctacctatgaaccaaacctccgcaaagggatccgagatctataacaac

SEQ ID NO: 462886 - DNA, 300 bp, Sorghum bicolor
  unsure (1)..(300): unsure at all n locations
tcatcatgatcatcttgagttctgctgctagagaatggaaattcaataataaaaataaagaaggcgtgagtaaactcttttattcctctttttcgaactatgtttcattcatatgatagaaagaatatgggtttaaataaattgtatctttgcagagtgttccccgataaatacttatttcttttatccaattttctctttttttagcggggttggggtannatacaaaancattgactattaataattccatccatatggggggagggcctcgataccattttgcagtgaaattagagg

SEQ ID NO: 462887 - DNA, 391 bp, Sorghum bicolor
gtaccccgtattcagaaccccatagtccgcacctcctcaaatacaaagcacttccctagttagatgtaggttagacttcccgttcgagaaactctaccttctacctgccctcaatttatgcacgattaatgaatgccacctgggtggaagcgagaggtggaaatggaaggtcttagttcggaggtgggatctctacctgatagttgcattgccattcatgatgatcccctggcattcgtccattcagccattcaccattcacccattcaactggaattttggttgaatgccggaattgtgtccacaaattgtggatggatagttggttggctggctggatggctggctggatggctggctggatggatggtgaatggctggcggcggttcg

SEQ ID NO: 462888 - DNA, 319 bp, Sorghum bicolor
gtacagtttttcatcaagttgtgaggttgggatcctgggtagaaactggcgatattttagtaggtaaattaacgcctcagatagcgagcgaatcgtcgtatatcgcggaagctggattattacgggctatttttggtcttgaggtatccacttcaaaagaaacttgtctcaaactacctataggtggaagagggcgcgttatcgatgtgaaatggatggggggggacccctttgacataatggttcgtgtatatattttacagaaacgtgaaatcaaagttggggataaagtagccggaagacacgggaataaggggat

SEQ ID NO: 462889 - DNA, 402 bp, Sorghum bicolor
  unsure (1)..(402): unsure at all n locations
tacagtatttcatcatttcatatccccccttttctttacgtagtattttttttactatacctgttgacgtagcattatagaccgtattgttactcttgctaccatcaggatagatctgtccccttcctcggtttccccctacatatatgggatattttaagaaatgaacgtctttttttgtagcgggatcgggggaaagaatgggaaagacaatttcactgtatttcttaccgggaacagggcctatcacaagaatattttttttattgggacgataactctgaaaagagagatttcctatcttttctttcaactcaggagaaatacggncgggcggcgctaattcgaatccctcaggcaaaataagaacagganccacattngaccctccctttttaccat

SEQ ID NO: 462890 - DNA, 348 bp, Sorghum bicolor
ttgcatttttgttttttcgctcaaactcaaaggggaaactttgcttcttatctttttttttgaggatcgacgaatcaaatgatatttttgttctaatttatgccgcttcttctccctctgaatcaaacttttttttgccataatgtgccgttcctattattaccaagtatatggttctaatcctagtctagaaaaatagggaggggaaatctaaaaaggcggatcctccctctccatcaagagtaatgaactgggttctgatacagcacaaaaaaaaataactaaattaaccaaacttgcctgatgtcgaggcaattcagaaagctgcacacgtgaatctataaccca

SEQ ID NO: 462891 - DNA, 466 bp, Sorghum bicolor
  unsure (1)..(466): unsure at all n locations
acctgcgaaattcgaactttcgtcgaaatcgtctctattcatatgtatgaaatgcatgatgtgaaatacgtatgtggagttccctagaatttcatgtgattcagtaaacagaatatggattccatgattgctagattgatccgtagggattgatgaagagtgagctgataatggaatttttcttctataaatatgaaacttaagggggggatgctccggaatggaaatgagggaatgtccacaatacccggatttagtcagatccaattcgagggattttgtagattcattaatcaaggattggcggaagaacttgagaagnttcccacaattaaagatccagatcacgaaattgcctttcaattatttgcgaaaggatatcaattgctagaaccctcgatanaagaaaggaatgctgcgtctgaatcactcacctccttcttccgattatatggatccgggcgat

SEQ ID NO: 462892 - DNA, 194 bp, Sorghum bicolor
tcatcacacacttctacaatgtctcaattgggttatatgatgttagctctaggtataggttcttgtgaagctgctttattccatttgatcactcatgcttattcgaaagctttattgttcttaggatccggatccgttattcattcaatggaacctcttgttggatattcaccagataaaagtcagaatatggt

SEQ ID NO: 462893 - DNA, 426 bp, Sorghum bicolor
  unsure (1)..(426): unsure at all n locations
caggtcccagaagcgcgtgataaatgccaccgaagcctaagactgcggaggaaattaagtgaagtactccggatacaaagtaaggaaaagtatctagaacttctccccccggccctactccccaacctagagtagctaagtgcggaagtaaaatcaacccttgttcatacatgggcttttctggtacgaaatgggccacttcaaataggttcattgctccggcccagaatacgattaatccggcatgggctacatgagctccaagtagtttaccggacaaattgataagtctggcattcccagcccaccaagcaaagccggnggtttcttggtcacgaccagntaaaacgaaagttncattaaagagcgtttncacgtggtagaacctnttaagggaatataagattttcatgaggctgatnctga

SEQ ID NO: 462894 - DNA, 381 bp, Sorghum bicolor
ggtacagtttttcatcagtgataaattctttgagttaacttgctattttcatgagaaataaaattgacaagtcgaagttggagattatcctcttcttgcaggagatcctgcgggaaaagtgttgctaaatttctcccttcgtccatttcatatgagactgcaggtcgaaccgaaacaaaatacttttccttgcttttgagaatttttttccgttgaacataaacccaatttttccttttttttgattccttagaatcttttttttctctttctgggggtatcaaactgccacctaatatcttatccgcctcttcaggaaaatgaatatctccggaaaagattttgagttctgtatgggttttttttctcttcacctcggcc

SEQ ID NO: 462895 - DNA, 450 bp, Sorghum bicolor
aatacaagatgctcattgagtgataataaattcatgttcacttatacggcgcgggtccagattttattaaagtaaaggaatattttgaggttctgttcctagacgaaacgaaatacttagaatataatattctaattaattcctattatacaaaaaggtccagatagactgaacaaaaagggctttatttcgattgtggggggggggaaaatcacatatttgtttccttcgtatgaacagaaaaatacaatgactcaaagaagttcctaccacgaactttgtaccgcgcatattacttagaacaactaggaaagtaggataagcaagaataaaaaaaatattcttcggaatagcggcatacaaaattaataagaaatgcaaaatgaagaaaagggcacctaatctcacctttttctataccataaagaaaagaaccagagacttgacccc

SEQ ID NO: 462896 - DNA, 559 bp, Sorghum bicolor
  unsure (1)..(559): unsure at all n locations
catcatttcacaaatttatcatagacttcgtctatcgcttgagagaagcaacaaagagtggtgagcttaaaaagaaaaacagatacgaatcgacagatttacctgatgaaaattgacatcagaggactctgatgaggattcctcaaactcttcataaagaggatccagaaagtctctggttagtcgagaccctccatttcctaatttgtgggttcttttccgctcaattctagtttattagattcttgtttaaaagaatcaaagaagatgaatagaactaagaacacataaaaaagagcatagagaaccattaccaaacgttcctcctaagaatcatattgggtatctgtccccttccttttaaccctaggatcaaaatctagaatcctcccttttcctagtgttcggaaacggaaaaccctgaacctggaggaggtaggtctgtagggattgctttttattttttggtgggcaggcagnagtataatttttatactttggagataaattcgactcccaacttttttttagaataaaaccggcgataaaactccacata

SEQ ID NO: 462897 - DNA, 382 bp, Sorghum bicolor
  unsure (1)..(382): unsure at all n locations
gtacagttgttcatcacgacccttactgcccaaccggagagcggacggctaatgtgttccacttattgaacaggatctatggtcggtccgtgacccctggacgccgaaggcgtccttggggtgatctcgtagttcctacggggtggagacaatggggtcggtccatggattttccttccttttgccacatttcgctcaaagggttgaagggagatgggggggggagctattcncaagggccaacttgatcctcttccccagggatcccagatgagggaagcctangagagccgccgactccaactatcgnccatgtacgatccatactagatctgaccaactgcccatcctacctnctntacctttttgacagcccatcttt

SEQ ID NO: 462898 - DNA, 502 bp, Sorghum bicolor
gtacagttgttcatcaatactctaatacatagaaaagaagaatatatatgcataatataataaagagaaaatgccaagagattggcattttcatttgatcattatatacatttttgagatattttgttttttttatttgttaataatttaaggataaatagttcactaaggagaagatagaatcatagcaaatgaaatttctaattcagcttagaaaaaaggagtgaatatcaagcgttatagtatgatttggaatactctaaaaaaggaaggagggaggcgggagagagaaaaacttttggatatattcattccgattgaattgcaaatatatcaacgataaaatcaattcaattctgaattgcaataagcgagcggggtgtctcaaataaagatgagttgctagactacgtcgaataatgaattcaatgactcaaaaaaaactaaaagatggcttaaattatacaaggaatcctgggttcaaagaaaagtaacatgggga

SEQ ID NO: 462899 - DNA, 385 bp, Sorghum bicolor
  unsure (1)..(385): unsure at all n locations
tcctcacgtccatggatcaatttatttcgtggattggatttcacttgcctgtctacggttcccttgcgtgtgctcgggataggtgttttgtataaatgtttcgccgtattattaagtattctcctttagttcgtttctctatctagaagtggaatagaataacccggttgaagggtaatgatcatacgtctgtaatgcattgtatgtcccagaataggtcccattcttctaccctttccgggtagtcgatggctattcacagctactaccttaacaccaaagaagagttcgacccaatgctttatttctgtcttagtgaatcccgattcgacattaaaagtatattgattctttcccaataaacgaagactctttttttgnaaat

SEQ ID NO: 462900 - DNA, 594 bp, Sorghum bicolor
  unsure (1)..(594): unsure at all n locations
gtacagtatttcatcaggtttatccaaactttaacaaataatgcaatatatttcgtaatctgtttgtgagaaagcgtgaaaagagccaagagacttgaatttaaggcttcaacagtcataattatacgaattctacatactaattcgaattagccaataaattggctatcatcttttcaatataaattattgctatattcaaattgcaatatcaatgaattgcaaaaatgcaatattcaataagtaaaaaacaatactctgaaataacctactcaaaaaatagatattattaaacactaataagaaaataagatgagatttctattcatcttaatgtttcttattattatatatgcgcctttgtttagaggattctatgtctaattatttaaaaaattggattgattgatacgagttgatttcctgttacgatggatggaagaaagaatggatagtccaatagctgcttcagcagcccgaagggctataacaaaaattgggaaaatggcttcttttaattggcgactatcanatagatcaaaaaatgtacgagaattaaataaatggaatcagattaagtncagacatattaga

SEQ ID NO: 462901 - DNA, 199 bp, Sorghum bicolor
  unsure (1)..(199): unsure at all n locations
gaagaaaatcttggaattcaagaacgattacggattactaggtattaggatttttttacttagaaaaatccatttttaactaactctaangaaaaaaaaataactactgcttaacaacttatatgcatatacaaaaaaatatcctaatacctttttccttncttnaatcttttaattttaatcatttcatggggggggg

SEQ ID NO: 462902 - DNA, 405 bp, Sorghum bicolor
tggatcccggaacccccgcctacatacattcaaaattggtgggctatattggccaaactacctgagcactgggtccaatgtgagtaggatcgcttagccatgcttcataattggaaaaacgggcaccgtggaagtacatgccactcaaccaaagaaagataatggagagttggtcttttttgagcgggggggagttttcgggagatctcctccaaatcaccggtatgactatcgaaatcgtgagcatcagcatgtaggttccagatccaagtggtagtgtcgggacccttagctattgttcttgagaaatgcccgggtctggcccattcctcaaaagatgtttttacaggatccctatccacagcaattttaacttctgggtccgacggacgactaatcattaag

SEQ ID NO: 462903 - DNA, 613 bp, Sorghum bicolor
tcaattaatgcaaaacgatcaattaaagaaaagagttgatactacaattcgactactcaatcaattggtagtatccctagagtccactcctcccccatactactagcgaaagagaaaatgtaaagactaccattaaagcagcccaagcgagacttactatatccatgtaaattatgtctcctatttctatgaaagaattcttctactatggatcaataatcatagtggaatcaagggtacagagtcaaaaggccattctattctgccctaagactatggatgaacccgttaaaggaatttactcctaacaaattcttatatgatttctggtagaattggagagcattaagtagaaatatgatacatcgctctttccctaaaaaagagtaggggatgctctgaatagaagacgcgggaatagagagattttttctttcgtttgttaccttttttataagcaaaggacgtaagaatctaccataaaattaggataaataaatatttattggatacctaacttacccatgtttatttttatttttgacctaaccctactgctgcccgcttctacctttctatgaaagagtagggggccttatcccacccaaaattg

SEQ ID NO: 462904 - DNA, 436 bp, Sorghum bicolor
ccttatagagtaggagatagaaattctcctaaatatctatctaatctacttacttcgttccctaatttcattcaagagatcctgaggaaaagagttgggtttccaccgagctgaaacaatataatatactgatggttctagtaaaccaaaaccatcgttttttagctattgggcttccatttcctacaaaacaaaagaagatttagttacgattggaaataaacttttttgtatcttcatccatagatcctttactcatatttattcaatcggaatacttatcggaatacttaatccaatgcaaaattttgcttcgcgactacgtactcataatcgaatttgtattttagatgcaaattcaattagtctttggatactaatcgcgagaatgtatattcttcctcaatatgctattgagaggaaaaggattaaaccc

SEQ ID NO: 462905 - DNA, 504 bp, Sorghum bicolor
  unsure (1)..(504): unsure at all n locations
aggtacagctgttcatcacctgggcatagatagaattaggtaagataaaattgattggaaagcccaaaatcagaccaaagcaattacgtctgctagaataacaaaaaagcgcttccgaattgatctcatcctttatataatataatttttctttgttcggtaataacttaatattggaataaatcactcattatagcaattaataaatggaaagaatttggcattagttcatgaggaattctgtatgaatagggataaaggaaggaaagaataaataaggatccttttttgtattgtattccgtatcttttgtcctattcttctttccccgggaggggtatacttaaaaaaaagaataaagggttaattcgttcttgatagccatttccttaacaagtgaatgggaacatactctagaccggaatctgaagaaagtactggttgatcatttccaaccatttcaagtcctttattatgatccttttatgaggaaaaatggntaat

SEQ ID NO: 462906 - DNA, 585 bp, Sorghum bicolor
  unsure (1)..(585): unsure at all n locations
ggtacagtatttcatcaggaatactaatggatagggcctcgttgctaagtgctacaagatctagtgcactggaactcgtggttatggacccgaatcctttagtatggaacattgtcttttccaagtaaaaacccctagtatatgaaagaatgaaaaggtgctttcgttcttgtggaataagaagccctcgtaccttaatgaaaggaaaataggaatttttcgttaggtatttgaccaaataggatcgtccagttcctatagaacctatcactaaaatacccgatagggctaagcggaacgaaaagggttttccatgagatggtaaatgaaaacgattagccccacacgaggtttgggaataagtgattgtctgataatgagcaaggaatatacgtctttctgctaaagaggatctattaaactcataattcattagatccttgttagcaatgtcaactaggtatcataagtaaatggatctcgggtgttcaatcctttgataaccaaggtcattctttgctaaagagaaatgatcactatgggtcagacccaatagaatnggatccattccaaatagcgaggatt

SEQ ID NO: 462907 - DNA, 522 bp, Sorghum bicolor
  unsure (1)..(522): unsure at all n locations
gtacagnctgntcatcaagctgctccctccgctaaaatttgcccttttttaatggatttaccccgcggaacccgaggtttttggtgcatacaagtatttttgttagagcgccgatgggcaactaaaggaatacttatggtcttcccactacttgataaaaggatcttgtgactatcactagaaatgatctttccctcgcgttcggctataacggaaaccctcgaatctagagctgtttgtcgttccaatccagttccaacaatgcacttctcggaccgagaaagtggaactgcttggcgctgcatattagaactcattaaagcccgattcgcatcattatgctcaataaaaggaatgagagaacctccaatagaaaaatattggaaaggaaaaatacttctaacatgaatctgttcccatgcaatagtcaggaattcttgacggtatctagctggaacaacctgttcttcctgaataccctgattcaaggacaaagaatttcctgctgctatcatataatat

SEQ ID NO: 462908 - DNA, 403 bp, Sorghum bicolor
  unsure (1)..(403): unsure at all n locations
tatcatgagaactttctacatttatgttttatttcccctaattctaattgggtggggtataaaggaatttgcgctcttcatatacccatatggctggatagtaattttcagtgatatacttcttatctgttttggtgagagattcaaacaatttttagcaggcatctcttggaaaaactttcgagttcaaaactttttaatttttcttaaaaagttttggacggatttgttgaaacgattttcaacaggtaccccttggaaatggggtacttgactattctacaaggattctagtggatttggaacaaactatgttgggagtnttatcaacaattttattctaaaaaaaagttgggagtngaatttatacctgnaaagataaaaattatactactggctggcc

SEQ ID NO: 462909 - DNA, 452 bp, Sorghum bicolor
  unsure (1)..(452): unsure at all n locations
tacagtatgttcatcatatatagcaaagcaaatctctacatatctctatatatgtatatattatgtacatgtaatatatacatataatatgtacattatgcagtagacccataatggtaaatgaaagtggctaattattgaataaaaagcccttttaactcagtggtagagtaatgccatggtaaggcataagtcatcggttcaaatccgataaagggctggggacttagtggtagaataatgccttggtaagacagaagttatcggttcgaatccgataaagtacttttctactaaattcattcatttcttttttgaaaatgtctccattttttttttttgcaattttatgacttantttaatgcgagatgcccacatttttggtctgaacccttaacgaagcacagaggtaaaatcggcaaaaaaaatgaaatgggactctttttcctgg

SEQ ID NO: 462910 - DNA, 435 bp, Sorghum bicolor
  unsure (1)..(435): unsure at all n locations
gtacagtagttcctcacctagagtagctgttaatacgaataacagaaactctgttatagccatttctgtacattcaatgtactctacggatagaggaatacataaagttgaacataataaaataagaaattgaaagatttcgttgaaattgttcgtttggaaatttcccgaaaagctaattataggttcttctctccatcggaacaatagggccgttatgcttattactaaacttgttgaagagatgaaatagaaccaaggtctatctttttgatcagaggttaaatcgatcatcagaagaagaattaggccaaaaattaggatacattctgggaaaatgaaacttccattgaagagaagcaaatgaaacgctttcataaaaattctnggagaatcgagaatgaagttttcattctgtacatgccagatcatgaa

SEQ ID NO: 462911 - DNA, 532 bp, Sorghum bicolor
  unsure (1)..(532): unsure at all n locations
gtacagtttttcatcaatcagcccttcttggggttcctagggtattgtctgtcccgataaatacaaaatttccggaataatataaaaaataaataatattataaataggagtaaagtattgatatacttagaattacataagcaaataccaatgtactaaaaaaagaaaaaagtatctaatctaaaggactcattttcttttttaggattaaacaaaagggttcgcaaataaaagcgctagtgccacaaccagtccataaattgttaaagcttccataaaagctagactaagcaataaagtacctcttattttaccttctgcttctggctgtctcgcaataccttctacagcttgtcctgcagcagtaccttgaccaactccgggcccaatagaagcaagccctacggccaatccagcagcaataacggaagcagcagcaattagtggattcatggggagctcctcgggtaaaaaaaaaagaatgggtaaggatacaatcaaccaagaaattattacttncaacctttaagc

SEQ ID NO: 462912 - DNA, 547 bp, Sorghum bicolor
  unsure (1)..(547): unsure at all n locations
attcgaaaattcgaattcatttcttgtttcaaatattcacttgtagcataccatatctcaacggattggcgtaatttttctaccgcgtgtacagctccataataatagtgtttctccaaaagaaaactctgttgttccgcgtcttggactaaccatcctttagagggtattgttaaaagatcctcgattcctaaagaaatcgatgtagtagtggcttgatggaagcccagagtctttatttgatccagtatatgggaggtatatcccattccgaaatgatctattaatctgctaataagccgtttcatagcagttccgtctatctctttattatgaaagaccaggttggcccgttctgccatacataagtacccccttttttggctgagtnggattcgacaattgctgagtaggattcgacaatgggcccgagtcagtgattcgaaaactttatttacctccttttnctaaatctaaatctggatttgcgccggcaaaaaaaatggactagcgaaactcgaacgccccccaaagggggctcccccaa

SEQ ID NO: 462913 - DNA, 470 bp, Sorghum bicolor
gtacagtagttcatcatttactaattttgttctctctatgcgaaccctctctctttctcgtaagaatgagatataggtagggctaaaataaaaaaaagagtcaaatcgcaccatctctataataagtaaatgcccttttttccccggaggttgtcggaattatttgcaataaaatattggctacaatcgaggaggtcttatcaatgaaatttccatttatacgggatctaggcataattcccaacccattctatatagaattcttttcattctatcacaaaataacataaaaacaaaacactcgattcttataaatcgatccatatgctctaaatggaatggataagagaggtatggattttccgctcagctcaaattgtctccttttccttctgtttggacaagaagagatatgaaatatttgactaagactggatttcatttccctttcctaatttctaacaacaact

SEQ ID NO: 462914 - DNA, 352 bp, Sorghum bicolor
  unsure (1)..(352): unsure at all n locations
gtacagttgttcatcattttttattttctttaaggaaattaatgcaagtcataatcgaatttctatctatttgcattatagacagaaattcgaatcattttctcgagccgtatgaggagaaaacctcctatacgtttctaggggggggttgtttatctacatctatcccaataagctatctatcgaatcgttgcaattgatgttcgttctctaagaggggggggagatcttcgaaaagtacgtttttatgatccgataaagaatcaaacttgtttaaatgttccagctattctctatttccttgaaaagggtgctcaacctacaagaactggntatgacactttaaggccgg

SEQ ID NO: 462915 - DNA, 299 bp, Sorghum bicolor
  unsure (1)..(299): unsure at all n locations
ggggaaaatagataatgagnatgnggnaanaagggaatgttgannngaatnaatnngtatgntnnnatntttaatagaattnnggttaaaagnatanatgtantgtaatgngtttnnnnatgggtatttggtaattangtatggggggggtaatnggnaatttganagnataagaaataaggaagnnaaagtggaggagtatttttaatggtgnagggaatgattgattaatnaatntttttaaatntaatnnngnttaattggaanaatataatnnaatannnaaaaatnnaattaag

SEQ ID NO: 462916 - DNA, 332 bp, Sorghum bicolor
  unsure (1)..(332): unsure at all n locations
aagtctaaattatagtaataactcaaaatattctagttatggaatccatatcgggaatcgtttattcttgcccgcttcaagatatgatgactaattaaacaatctcaaccttggggtaaagagtttacactgcttatgtttactttaacttttttcttgtacgtaggaaatgagattttttatttttacttcttattaatagggggggggggnttcactcatatanctatcnantttaacttaccaacncgaatacagaataagcaaangaagataagcattcaatgtattttaaaggaaaaagatcctatcccaacgaatcacacgcacag

SEQ ID NO: 462917 - DNA, 488 bp, Sorghum bicolor
tggtacagctgttcatcatctctttggtattttagactaaattcttttgttcctcgatgctcaataaaaccctctgtgtgttttaagatagaatcttcctccgggctcccatattcgtcttctgagtcttcctctgagtcttcctctgagtcttcttctaaagtcccatattccttctctgagccatcttcagagctcccatattcttcttctgagtcttcctgtgggatttcatattcgccctctccctctcgggtcctatatttgttctctaggctcccatattcttcctctgagtctttctctagagtcctatattcgtcctctaggatcccatactcatcttctagggtttcatattcgtcctctagagtcctatattcgtcttctaggatttcatattcgccctctccctctcgggtcctatatttgttctctgggctctcatattcgtcttctgagtcttcctctcgagtcctatactcttc

SEQ ID NO: 462918 - DNA, 470 bp, Sorghum bicolor
  unsure (1)..(470): unsure at all n locations
caggccaacctatttcttcgctttttcgccaacaaatccgaattatcttgaagaatagaaggatagaaacaattccaatgaccgttggacacgattcgatctggcgttaaataatcaagaatttccctatcttttttaccaaaagtatccaacagtctatggcttacttgatcattagccattgagaagtcaaagatatatcttccatcaacagaaaaagaataagtattcatttgatcttgatccttgtgcagtgaaaaagatgctatactggatctgcacatacttactgacaatatccataaatggcttgtttttggtaatcgacgaagattaccatattgatattcgggcgcatggtaaacatcagtactccagtgcatttccccgtctgattcggaataaatatgcttttgtaccttttctttaaaatgcaaagtggacgttccggcacgaatctncgcaattac

SEQ ID NO: 462919 - DNA, 500 bp, Sorghum bicolor
catcaccctcccctcaactccatatccaaataaaagcggtaaggaaaaagttttaataaaaagaagaatcaatggattcatgattaaacccctcctacttcttgtattttcgtacaattttgattaagtgagggatcaaatagaaatatgtagtcaactttatttgaaggtagtttggaggatcataaatatgactattgctttccaattagctgtttttgcattaattgcgacttcctcagttttagtaattagtgtaccccttgtatttgcttctcctgatggttggtcaaataataaaaacgttgtattttccggtacatcattatggattggattagtctttctggtagctattctgaattctcttatttcttgaatttgtttagtatttagtaacccgatacaaaataaataaaaagaaaggcccttttttcgaaaaaattcggatttttatacacattaaaatgctattttcggtcccgattattacctattct

SEQ ID NO: 462920 - DNA, 423 bp, Sorghum bicolor
ggtacagctgttcatcagactcgggctttaatgagttctaatatgcagcgccaagcagttccactttctcggtccgagaagtgcattgttggaactggattggaacgacaaacagctctagattcgagggtttccgttatagccgaacgcgagggaaagatcatttctagtgatagtcacaagatccttttatcaagtagtgggaagaccataagtattgctttagttgcccatcggcgctctaacaaaaatacttgtatgcaccaaaaacctcgggttccgcggggtaaatccattaaaaaagggcaaattttagcggagggagcagctacagttggcggggaacttgctttaggaaaaaacgttttagtagcttatatgccctgggagggttacaattctgaagacgcagcactaattact

SEQ ID NO: 462921 - DNA, 464 bp, Sorghum bicolor
aagctatttcggctctttcttaatcttcaaaaagaaattaattccgtaatggtaagacgaaaaaagaaaaaataaaaaggaagtgtggaaaaaatgacaagaagatattggaacatcaatttgaaagagatgatagaagcgggagttcattttggtcatggtattaagaaatggaatcccaaaatggccccttacatctcggcaaagcgtaaaggtactcatattacaaatcttgctagaacagctcgttttttatcagaagcttgtgatttagtttttgatgcagcaagtcagggaaaaagcttcttaattgttggtaccaaaaaaagagcagcggatttagtagcatcagctgcaataaggtctcgttgtcattatgttaataaaaagtggttcagcggtatgttaacgaattggtcgattaccaaaactagactttcttaatttagagacttaagagcaga

SEQ ID NO: 462922 - DNA, 426 bp, Sorghum bicolor
gtacagctgttcatcatcctcgatacttcccatattatgggtaacgtaggagacatccctattttcagccggggttcttaattaccactgcttagctttcaattcgcctctgaccatcaaattaaatgtgaataacccgtcctcctctctttgaaacaaggggcgcttccggttctgtgcgtgcttcaaacaattttgtcttctctatattaccaggtgtggtagagtcaataattttctatgaggaactactgaactcaatcacttgctgccgttactcaacagttttctgttgaggtctatcccgtagaggtagtcaaattggatcagtgatcgatttctaggtttcgtcgtaaacctaattggctacttccaattacgtaaatcactagtccaaaccgcacttacaggtggggccttccccat

SEQ ID NO: 462923 - DNA, 278 bp, Sorghum bicolor
  unsure (1)..(278): unsure at all n locations
tagcttccctcatctgggatccctggggaagaggatcaagttggcccttgcgaatagcttgatgcactatctcccttcaaccctttgagcgaaatgtggcaaaaggaaggaaaatccatggaccgaccccattgtctccaccccgtaggaactacgagatcaccccaaggacgccttcggcgtccaggggtcacgggccgaccatagatcctgttcaataagtggaacacattagccggccggtgtncgggtgggcagnaagggtcggagaagggcaa

SEQ ID NO: 462924 - DNA, 518 bp, Sorghum bicolor
  unsure (1)..(518): unsure at all n locations
tcatcaaaagaaatgtaaccaacgtttatttggaaaaagcaacaccaaagatttgggaccaaaagcggttagcagtgaccattgaataagtttcttcagcttgagttgggttaaaagcacggaaggtatttgcaccatcgccatcttcgaatagagtgttttctacggtagccccgtggatagcgcatagcagagctgcgcctaatactccggcaactcccatcatatgaaatgggttcaacgtccaattatgaaatccttggaagaaaaggatgaaccgaaatatagctgctacgccaaaactcggcgcaaagaaccaaccagattgtcccagtggataaataaggaatacggaaacaaaaacagcgattggaccagagaatgaaattgcattataaggccgcaattgaacagaccgagcaagttcaaattgacgtagcataaaacctattagtgcaaaagctccatggagaggcgcaaaagtncaaagaccacctaattgacaccaacgagtaaaa

SEQ ID NO: 462925 - DNA, 499 bp, Sorghum bicolor
gtacagttgttcatcacgcactccataaaaaaacaccaatactaagatcagctaaaacaaaacgatatcccaaagggataactaaaaaacttaataaaacggatatgactgctatagagggaccaatgctaaataaaggaatctctcctcgggatgggaggatatcctcttttaaaagtagtttagttccatctgctatagcttgaagcagtcccagggggccagcatattcaggaccaatacgttgttgtatcgatgcggatatttctctttctaaccacacaattacgagtacttctattgtgattcccagtaggagggccaaaatgggtagaatccatataagtccgtagatttcttttaataattccgatttcgaaaaagaattgatagtttctacctctaccctatctattatcatttcaacgatcaacttcccccataatgatatctatactacctaatattgtcatgatatcagccaatttcatttttttaa

SEQ ID NO: 462926 - DNA, 464 bp, Sorghum bicolor
  unsure (1)..(464): unsure at all n locations
tcatcacttctaggggattctatgtcagaaagcgtgaatatttatttcattccattaaaaataacaagccaattctgtttgtaagaagaaagagaagcagatctattctatactcgataagtgccaatatgcaatgggtagcttgggctatttggaaaaacgaagaatagatccttcatccctctttgtttatcattcgaatcacagattgctttttctttattcaatctgtcttaccttccttatatgtagaatctttcaatctatgtattaatagaatctatagtattcttatagaataagaaaaaaatgaagataataaactgcggattctttctttctcttccattcttacgtttccatattaaagtgtagtttttttacttaaatttaataatattaatctaatatgcccattggtgttccaaaagtacctcacccnattccccggagatgaagaaacg

SEQ ID NO: 462927 - DNA, 337 bp, Sorghum bicolor
  unsure (1)..(337): unsure at all n locations
gaatcgcgggcctattcattagctcctatttgtggtgcactattggatggggtgtaggcagtggttatgaccgattcgatagaaaagagggaatagtgtgcatttttcgttggggattccctggaataaaacgtcgcatcttccttcaattccttgtgcgggatatccaatcaattagaatttttgttaaagaggtgtggttcctcgtcgtatcctttatatggaaatccggggccagggggtcattcccttgactcgtactgatgagaagctttttactccacgagaaattgaacaaaaagctgncgaattggcctatttcttgggtgtaccaatt

SEQ ID NO: 462928 - DNA, 452 bp, Sorghum bicolor
  unsure (1)..(452): unsure at all n locations
agagggaccaatgctaaataaaggaatctctcctcgggatgggaggatatcctcttttaaaagtagtttagttccatctgctatagcttgaagcagtcccagggggccagcatattcaggaccaatacgttgttgtatcgatgcggatatttctctttctaaccacacaattacgagtacttctattgtgattcccagtaggagggccaaaatgggtagaatccatataagtccgtagatttcttttaataattccgatttcgaaaaagaattgatagtttctacctctaccctatctattatcatttcaacgatcaacttcccccataatgatatctatactacctaatattgtcatgatatcagccaatttcatttttttaactagctgangaagaatctgcaaattaataaaacccgggggacgaattttccatctccaggggaaaaga

SEQ ID NO: 462929 - DNA, 509 bp, Sorghum bicolor
  unsure (1)..(509): unsure at all n locations
tcatcacttccatctcttggataaatagagagggagggcattagtcctttggtgtccctggcagtgaagaattggggcttcacaattactagccaatatttctctcatgccttttctcgttcatggttcgatattctggtgtcctaggcgtagaggaaccacaccaatccatcccgaatttggtggttaaactctactgctgtgacggtgcggggggggaggtcctgcngcaaaatagctcgatgccagaatgataaaaagcttaacacctcttattttactttttcactattttgaaatacgaaaaagatccaaatccaaaacgcaaaggtcgtcttattcaaaacctcaatcatcccctctctcccacttcacacctcanaacgcactgttcttatagagagaaaggcgctttcccatcttcttaacccgaaatgaaatggctgaggagaagaaggttccttttggggggtatccccgggaagagatccagtggagacggggtgggc

SEQ ID NO: 462930 - DNA, 653 bp, Sorghum bicolor
ttttcatcaagaccttgtttgtatatccttattctattttttattaaattcctactttgtgggtgtcgcgcaacttcttatttatgtgggagccataaatgtcttgatcatatttgctgtaatgtttgtaaacggctcagagtggtctaaagataagaattattggacgattggagatgggtttactttactcctttgtttatttattccggggggactaatgactactatcccagatacgtcaaagtatggaattctttggactacaagatcaaaccaaatagtagaacagggtctcataaataacgttcaacaaattgggattcatttagcaaccgatttttatcttccgtttgaactcatttccctaattcttctagtttctttaataggtgcaattactatggctcgacaataagaaatacttagaatgagtcaaaattcttagaatttcaaatataaaataaataactaaagaatcacaattttgatttagtaaaacccatctacttgcaacacaacaaaagagaaaagaaggtattttgttggtaattgttctattctaattaattgaaacggttcaattctttgccttaatattaaaagaatccaaaatgataaggaattattaatgatggttgagcatgactttt

SEQ ID NO: 462931 - DNA, 432 bp, Sorghum bicolor
gttgtgggtccttcgctttccttactcaatgtggattacctctagagatagcaataaagctttttcagctatttgtaattcgcgatttaatcacgaaacgtgctacttctaatgtcaggattgctaaaaggaaaatttgggaaaaggaacccattgtatgggaaatacttcaagaagttatgcggggacatcctgtactgttgaacagagcacctaccctgcatagattaggcatacaggccttccaacccactttagtagagggacgtactatttgtttacatccattagtgtgtaagggtttcaatgcggactttgatggggatcaaatggctgttcacctacctttatccttggaagctcaggcggaagcccgtttacttatgttttctcatatgaatctcctgtctcccgctattggagatcctattt

SEQ ID NO: 462932 - DNA, 523 bp, Sorghum bicolor
  unsure (1)..(523): unsure at all n locations
gcagttgttcacatatcgaccaaagaagnctacttcttctggttctggatcaaaaattaataaaataaagaaatctttttttttttcaaattttaaaataaggaataaatcatgtatatatctaaacaaccttttcgtaaatctaagcaaccctttcgtaaatccaaacaaacttttcataaatctaagcaaccttttcgtaaattcaaacaaccttttcgtaaatccaaacaaccttttcgtaggcgttctcgaataggcccgggggatcgaattgattatagaaacatgagtttaattaatcgatttattagtgaacaaggaaaaatattatccagacgaataaatagattaaccttgaaacaacaacgattaattactgttgctataaaacaggctcgtattttatctttcttaccatttcgtaactatgagaatgagaagcaatttcaagcccaggcaatttcaataattactggtcctagacacagaaaaaatagacatattcctcaattaacacaaa

SEQ ID NO: 462933 - DNA, 595 bp, Sorghum bicolor
gcagttgttcatcatttggatttgatacagctacttgtgcaagcattttacgattaagaatcaattccttcttggacagattgtgtattaatttactataactattgaatacgttatatacccgtgttgctgcgtttatccgagtgatccacaaacgacgaaaatccctcttttgcctgcctctatctcgatgagaagaaacaaaagctcttcttacttgttgagtaatcattcgattaagtcttaaatgagcccctctaaagtttgaggcaaatgaacgcatttttgttcgtcgtctccgagctatatatcctcgcggaactctggtcattgaatcaaattaaccttaatgaataactaatgatttttcttcttttaaccctcttttttcccattaataactaaacggattattccgatatataaaatattaattccaatggcttttgctactataaccttcccaaccacgattttttattctattcagttatttcgcatagaaataacaaattctaacgatactaaaaaaacagtgggttccatcgtttttatggttcccttttaaacggcgaggccctctctatacaccgga

SEQ ID NO: 462934 - DNA, 623 bp, Sorghum bicolor
  unsure (1)..(623): unsure at all n locations
tcatcataagtaaactaataatattaagaactagatcatctaacgccattgaaaaatgaaattggattttcgggggaattttggaataaaagataaataaagaatttaatttgaaaaaaaaattctttctatttcggattatttcttttttaataggatggatttcatcctctttttggagcaaacggtcgaatattcccctattccttgtgattttaactcattgtattccatatggaataagaggagaagaaaagcattccacgacccccaaggggccccctcaaaaagggaactattccttgaatttacttttttttttatttttattcgttttttgaaccccaacaaaagttgattcgaagttacttcaattatccttttcttttaagttcttcttgtaaagttccatgcttgctgtttggtcaagaaagttagacctaatccaacaaacaagacaaggattgattacgaatcttgattcttcaaagaatgtattccgtttctttcataacggattatccactattcgattttctatttattagatattattttatgctaaccaattaaaatcccttaactaanaagggatagattttgcatatacttatctttggatt

SEQ ID NO: 462935 - DNA, 668 bp, Sorghum bicolor
  unsure (1)..(668): unsure at all n locations
tccctatacacgagtctgttgtcattctactgcaatagttgtactagaatgatgaataccttgagcaggtagaaatagaaagaattttgttaaaaaggaaaagggctttctttctaaaggaagaaatatgctaatttgattaatattaggaaatcaaatgagtgagtttatgcttcactaattgaatgataaatgactacaagtgaaggagatagacggtttaaacaaaaaaagacccaaaatttcaaacacgtgtctagaatcacaggaaaactacaaacaaaaatagtgaaaattagctcgttaggagcccatccaagattgttgtagacccaacgaattagtagttcccaaccgcgggtggagtgaaatccaacaaaaaaatcagtaactaaaagaataaaaaaagcttttattgaatcatttaagttatagaaaaattcctgaacccaagaattcaaaatgacaagttcttctttacccagaaaaaaagaaccacttagaatagccaaacagattatatttgttgagaaatgcaaaatgatatggagatgatcctcattatctattttggccaattgtattatttccttgngtattcctataggaagtttttggacatgtgtcttcgggttctcttttatcatttcgtccaaagaaaaagttct

SEQ ID NO: 462936 - DNA, 569 bp, Sorghum bicolor
  unsure (1)..(569): unsure at all n locations
atcaaacaaaactgggtaagttaggtatccaataaatatttatttatcctaatgggagggggtgttcttacatcctttgcttataaaaaaggtaacaaacgaaagaaaaaatctctctattcccgcgtcttctattcagagcatcccctactcttttttagggaaagagcgatgtatcatatttctacttaattctctccaaggggggggaaatcatataanaatttnttangaataaattcctttaaccgnttcatccatagtcttagggcagaatagaatggccttttgactctgtacccttgattccactatgattattgatcaatagtagaagaattctttcatagaaataggagacataatttacatggatatagtaagtctcgcttgggctgctttaattggagtctttacattttctctttcgctagtagtatggcggacgagtggactctacggatactaccaattgattgaatagtcgaattggagtatcaactcttttctttaattgatcgttttgcattaataattttgccaaactctattttttccttctttagttt

SEQ ID NO: 462937 - DNA, 613 bp, Sorghum bicolor
tcatcaatacataatgtaaatgcataaatttgtcttctaaaaagggaaatcttgaaggggtggatgagcaataatgaaactttggtctttctttttcttctggacaagatagttgccctagcgagagtggcatgcctacaacaatcccaaacccctcagatagaatctgagaataaaactcagaataaaaataatttttttgatcaagggagtggtcttggttaggataattaaccgaattaatccaaaaattctgctgatacattcgaataattaaacgtttcacaagtattgaactaaatttcttgttattacaaccaaaaatttccacgggttcggaaccatttaatccataatcatgagcaaatgcataaatatattcctgaaagagaagtgggtagacgaagtagtgttgacgagatttctgtttttctgaatacccttcgaatttttccatttgtatttctacttgaatcagagaaaaaagcatttctcggtttatcaaatgatgatacatagtgcaatacggtcagaacaaggtggtgcataatacaaacccaggaaagaaagggagtctaatccatagaaacttttccgctccttttctatctaa

SEQ ID NO: 462938 - DNA, 553 bp, Sorghum bicolor
tcgtgtattggcccctttccggccagatccaactcggcctgctgtttgttgccccagaggaggacaacatggagacgatcgtcgcgcaggatgcgcttgtaatcacgtggaactcgtcgccagacaccgcagatcttgcccgtggcattctgatagacactgagagtgcccgccaaggtggtctccagttgatgctcctccaggattacacccgcatcatcaacgaattgaatggcacgcggacgaccgattcgcgatgaggtgtagaaggagtagtatagattcttcttgtggaacaggaaacgggcggtggccaccacattctgcggattgtaggtggtgtacatggacttcatttcctcacccttgaggaaataggaggtgcggcccgttagcaacgcagcgtaatctataaatagggatcaaatgaaaggtggagataatccaggtgttagataaatacaatagttctcttggtaattaaatgtaggagctggtgaatgggattacaatttcccgcaggatttggcggattctattgggatctgggtgg

SEQ ID NO: 462939 - DNA, 572 bp, Sorghum bicolor
tcatcaatgcatatattaatgtacataatatatacatatatagagatatgtagagattttcttttctatatatcttgatctcgaagtttttttatggcgagatttaaaatcttgagaaaattaagaaaaataagaaaatctttcatattatctcttatcacttgcacaaagtataggtatttattattatataaataaatacatatacatatcatgtataataaaatacatgaacagagagttgacacacccaaaaattattatatatatcggatacatttgaagaggctaagttcataggtatgtaaacatgatctcgtacgactcaccaaaccaaagctcggaacggaagttccttttttttttaagaggagaacaaatatgtatcaattgttgaatcggatacaacaatgggccaaaaaggccaaaggggcaataagaactgctgttaaaaaaatgataaactttttttttatctttaggctattcacttttcacgtgctcagaatgttctgcagaattagggacttttttcttctatttggtgatcttatgatgagaactttctacat

SEQ ID NO: 462940 - DNA, 623 bp, Sorghum bicolor
gcagttgttcatcatcatacagtgacggtatttaattatgaaagttggctaagtagctgaccctttagtccgttcttttaagataaaggagcataagcctttttctttttattactatttcctccgcttaatggataaccatttgttaccaatgggggaattgcttcttccaatctagatgattggatttgcaccaaaggaaaccataaattccatataccatagaaatctaggatagagcttctctatcctattcattggtaccgatcagggatacttcaaaaattttattatttgtttgaactcatgatctgaacgagtcgcacatacaccctagcacatgttcctcgacgctgaggacatcccttaagcgcggccgattttctagcatttcgtattggctgtcttgcatttctaataagttgtttaaccgttggcatgtcgtatgtattgtatatataaaatggattggtttagatcgatcttaacctgatgattcatcatcatgaagtatttctattttctatagcataaaacccgaatttaggtttgaaataaatttacaaggaatccacccactaccaatccttaaacatttctggaaaccacactggatcagtatc

SEQ ID NO: 462941 - DNA, 583 bp, Sorghum bicolor
tcatcatatgaccaagagtggttcgaatgtatatagaacggatttctttttttctatttcccactactagatagtgggcataaatctcatgataagtcccaaaagattcatattgaacttcaatcggaacttctcttgacccaacgatgcgttgatctagtttccatcggagccacaagggactgtttaaaccgattcgtttctgtctatgagctcccagtgcatcataggaactagaaaaatggggttctttatctttcgtatacttataataattgttattattgtagttgatttttttatttggagagtttccgcaactattatatctatttgcacaaatacctcgacggtttccaatcgttaatacataaagtccgataagcatgtcttgggttggcacgcaaataggatctccaatagcgggagacaggagattcatatgagaaaacataagtaaacgggcttccgcctgagcttccaaggataaaggtaggtgaacagccatttgatccccatcaaagtccgcattgaaacccttacacactaatggatgtaaacaaatagtacgtccctctactaa

SEQ ID NO: 462942 - DNA, 642 bp, Sorghum bicolor
  unsure (1)..(642): unsure at all n locations
tcatcataccctttaanattcaagggtattctgaaagaggtatttcttttattttcacaatagctttcttttgaatccaatttcaagttcgattagaaggatagaaaggcgatgagaatgggaaaagataaattcaacattttattttaatgagttcccctttttagttccccttttttgcaattttcttattttttaaactaaaaaatacagtagtcaatattccttataatagatatacttaattatatcataagaatcttaagatatatttcgaatagatagaaatagtaaatttgaattgagacacatattctatgacagatcttaacttaccctctattttcgtacctttagtaggcttagtatttccggcaattgcaatgacttccttatttctttatgtgcagaaaaataagattgtctagaaacgacggggccaaattttctcaatgtatttccaggatcataatacagatatttttttgtgtaagtagtataatatgatagggtatgtagctctttctacacacaaatgaaaacgtctatggatgcaaatataagctacgagcataaatgcatgcatatgcgtagccgactatagcgaggttttttttattttaagtggatccactaattttt

SEQ ID NO: 462943 - DNA, 670 bp, Sorghum bicolor
  unsure (1)..(670): unsure at all n locations
cgtatgaggtaggaaactctcaagtacggttctagggaaaggaactgcctattccgaccgaggagaacaggccattctacagggcgattcggaaattgcggaagcttggtttgatcaagctgctgagtattggaaacaagctatagcgcttactccaggaaattatattgaagcacagaactggtttaagattacgaagggctttgaatttgaataagaccactctccattttcataaaaagggtggaagatcaaatcaagaatttcattatatccctttcttctaccttcaattttatatcatatttcataaggataaacaatagggataggctctggaacagaagtaataaagtacataaaagtcggcaatctaaatattcctacctaatatatcaggacggtcttattaataattctaatgagttatcttggaatttggaatcgaatcaaaaaatctatattatgctcactcaaggaaagtagatgtagatagggacttataccctcagaaaaaaaatacactagcttcttaaattaaaacgtaaaaaaagattnttttgttatgtcgggaaataatttcccagaataaccaatgtccgttaggcacctaatccttatgtcataatagatccgaacacttgccttggattgacttcaatatataatt

SEQ ID NO: 462944 - DNA, 195 bp, Sorghum bicolor
  unsure (1)..(195): unsure at all n locations
cgaaagcanattagcggacgcncagacgggaggagcanggaacacgnggaancccgngngaancagcaaggaccaccnngcaaggcnaaanaccccngggngaccganagcgaagnagnaccgngagggaaaggngaaaagaacccccagngggcagngaaanagaacgngagagcgggggggggcccccaagca

SEQ ID NO: 462945 - DNA, 534 bp, Sorghum bicolor
  unsure (1)..(534): unsure at all n locations
tcttttgtaccttttctttaaaatcaagtggcgttgcggcacgaatctccgcattacttgttcagattctacatattgatcattttgcactagaatcaagctttttaacggaatattcacactatgtagaatatcctgactctgaatagttacatgcaagtctatatattatagaaaaggggggtgcccatgacngntacgtgtggggtgaaccaaatcctcattgaattggatttttccattcgagggggatcgtataaggtcggcagtaccccctgtgaatactccaccagtatgaaaagttcttaatgttagttgagtccctggctccccaattgattgacccgcaataatacctacagcttcccccaattcgaccagatccccatgagtgggactccccccataacataattgacagatccaagatgtgctccggcaagtaaagggggttctaatatatattggttgggctcgaaaccgttgtgctcgaaaggcagntatgaattgattgactaatccaatttccatatc

SEQ ID NO: 462946 - DNA, 480 bp, Sorghum bicolor
  unsure (1)..(480): unsure at all n locations
tgttcaactctttgatgaaaagaaaagattaaaaaaccaaaaaaaaggtgtggggttccatctcttggataaatagagagggagggcagagtcctttggtgtcccttccagttaagaattggggcttcacaattactagccaatatttctctcatgccttttctcgttcatggttcgatattctttttttttaggggggtgggaaccacaccaatccatcccgaatttggtggttaaactctactgcggtgacgatactgtaggggaggtcctgcggcaaaatagctcgatgccagaatgataaaaagcttaacacctnttattttactttttcactattttgaaatacgaaaaagatccaaatccaaaacgcaaaggtncgccttattcaaaacctcaatcatnccctntcttccacttcacacctcagaacccactcgtcttatagagagaaaggcgctttcctatcttcttaacccg

SEQ ID NO: 462947 - DNA, 633 bp, Sorghum bicolor
ccaaaaatgcattgatcattacatagaattctattaagatattatatgaaagtcgaatttcttccattctcatttgagaatgcgaatacaaggaggtattttgtgtttgggaaagtccgaagaaaaaaggatttggaatctaccttttcttttgctttttcccttagaaaaataactcaatcaaaatccaattatctactctacaagaatgaaatgcttgttatgcctaatatacttagtttaacctgtatctgttttaattctgttctttgtccgactagctttttcttcgccaaattacccgaagcttatgccattttcaacccaatcgtggatgttatgcctgtcatacctgtactcttttttctattagcgtttgtttggcaagctgctgtaagttttcgatgaaatctttactattctgcctgccaaattgaatgatgtattcattccaaaaaaaaaaatggataagagctgagaagtcttatattatgaaccttcgattctaaaattcaaattcttctacattgaatgtatagctggagcaataaattttgatcagcctttctaccccctgcgcctacgttgaacggacctttagggacccacacaatacctaaactaatgattaga

SEQ ID NO: 462948 - DNA, 548 bp, Sorghum bicolor
gcagttgttcatcatgtacctgaaccggtggctcactttttctaagtaatggggaagaggactgaaacatgccactgaaagactctactgagacaaaaagatgggctgtcaaaaaggtagaggaggtaggatgggcagttggtcagatctagtatggatcgtacatggacgatagttggagtcggcggctctcctaggcttccctcatctgggatccctggggaagaggatcaagttggcccttgcgaatagcttgatgcactatctcccttcaaccctttgagcgaaatgtggcaaaaggaaggaaaatccatggaccgaccccattgtctccaccccgtaggaactacgagatcaccccaaggacgccttcggcgtccaggggtcacggaccgaccatagatcctgttcaataagtggaacacattagccgtccgctctccggttgggcagtaagggtcggagaagggcaatcactcgttcttaaaaccagcattcttaagttaagatcaaagagtcgggcggaaaaaggggagagcttcccgttc

SEQ ID NO: 462949 - DNA, 632 bp, Sorghum bicolor
gcagtatttcatcatttgattaatgctacttctattagtttggaacaattagaaaagtctaaaaacgaaacccttttttatgaaaaacaaagggcgatgaatcaggtccgacaacgggttttccaacaagctgtacaaggagctctaggaactctgaatagttgtttgaataccgagttacatttccgtacgattcgtgctaatattggcattctcggggccatagaatggaagagataattaaatttattaggttttgaacttctacttttgtttagaatttaggcattatttttcccttgcttccaaaaaattaaagaaacactaatggcaacccttcgagtcgacgaaattaataaaattctccgcgaacgtattgaacaatataataggaaagtagggattgagaatatcggtcgcgtagtgcaagtgggggatgggattgctcgtattataggtcttggtgaaataatgtcaggtgaattagtcgaatttgcagaagggacgagaggtattgctctgaatttggaatccaaaaatgttgggattgtattaatgggcgatgggttgatgatacaagagggaagttttggaaaagcaacaggaagaattgctcagatacccgtgagcga

SEQ ID NO: 462950 - DNA, 577 bp, Sorghum bicolor
  unsure (1)..(577): unsure at all n locations
tgcagttttctcattttgtaattcgcgattaatcacgaaacgtgctacttctaatgtcaggattgctaaaaggaaaatttgggaaaaggaacccattgtatgggaaatacttcaagaagttatgcggggacatcctgtactgttgaacagagcacctaccctgcatagattaggcatacaggccttccaacccactttagtagagggacgtactatgtgtttacatccattagtgtgtaagggtttcaatgcggactttgatggggatcaaatggctgttcacctacctttatccttggaagctcaggcggaagcccgtttacttatgttttctcatatgaatctcctgtctcccgctattggagatcctatttgcgtgccaacccaagacatgcttatcggactttatgtattaacgattggaaaccgncgaggtatttgtgcaaatagatataatagttgcggaaactctccaaataaaaaaatcaactacaataataacaattattataagtatacgaaagataaagaaccccatttttctagttcctatgatgcactgggagcttatagacag

SEQ ID NO: 462951 - DNA, 583 bp, Sorghum bicolor
ttttattgaaatttcattttacacaatatttttcgttctatttaccgggcggagtacagcgaaattcaaacagaattaaactaaaggataaacagagtaaaatctactaaagtaacacaaaaaatggagtaacacaaaaaatggaatttcatcaacatctggattttttgtatatatattatttatttttatgctgggggtgtagcaaaattgtaaggtaaaacgacataatagaccctggattccccatttaattcggagaaaaaaagaaattcttgttcatggaacatcgatagaaaaaaaagccgactatcggatttgaaccgatgaccctcgcattacaaatgcgatgctctaacctctgagctaagtgggcttacataacagaaatagtgtaacaaataaaaatatatatagggaatctgtaaaatatcagatcttaattattaatcttagttattaactagttctaaattggaagttccacttagaaaaaaaatactagaatttcataaagataaagttagcttgatatgcttaactaaaatgatattcttaaataggattaaagaatttattgaac

SEQ ID NO: 462952 - DNA, 620 bp, Sorghum bicolor
gcaagttgttcatcaatagaatagagataaaaacattaccataggctcattcatcgaaaatcagagagagaggaaaagaaaaaagaattttgatcaaatcaatagaaggaaggatcccttacctgatttgaatttcatcctccttcaaataggatatgctctaagtctccctatactttcctataatgactgcaacgattttatccattttgcgaattgcgattttgtttgaagtatattactatcatatacattatctaaatttacattatataaatcgatccactttaaataaaatagaaaaaatcaaaagaaaaaaagaaagagtaaataataaaacaggatattctgtttcataattctgaaatagagttcttttttttagtattactcctcattaggatgtatatattaatcatccgattttcattatgttctaatctaattagtagtaagtattttcttttttatttaatagtctctgactatcattaaataaagggtagagctattcttttttctagagattctagagaaagtgagacaaagtgaagcgaaagagttttctttgtataagaattaggtctatataatatctaaatagaaagggaatcaaaaag

SEQ ID NO: 462953 - DNA, 556 bp, Sorghum bicolor
  unsure (1)..(556): unsure at all n locations
ctcatatccgaaagagatccaggacctcttggtcctgaatatcagaataggacgaacgaaccggcctccgcggatatctttgcttcggaacaaaacaattagcattaggctcggtcaactggaatgtgtattatccatatgggagatcttccaatcgagaagatccatcgatctgagacgaagagaaagggcccattttctttacttattcagttaaaccaaggattcgttatggaaacagatagcaacaaccatttcatcagacatgcgtatttttgattatccggtggatttacacagtttcattaatgcaaattgtttgatgtagttagtactcaggttattcgacgctcaagaattcttatttaggcagttcatatcatcccatacatagtgttttgatctaagattgcaattcttccatgtttccgcagtagcatattgttccatggagctagggtccaaaataggaatcaacaagtgtttccacgactctaccgnccggccaatcctgttccactgaaatccctccctttttaatggccacatatcttta

SEQ ID NO: 462954 - DNA, 572 bp, Sorghum bicolor
tatctagttagcgatcccggctctgtgagttctttcttccgtgatgaactgtcggcaccagtcctacattttttctctgtggaccgaggagaaagggggctcagcaggaagaggattgtaccatgagagaagcacagaggtcaacccgcttcaaatatggaacatggattctggcaatgcaacggagttgggtcctcatatcgatccgaatgaatcagtctttctacagaggtcaatctttgcctattaggcaagaggatagcaagttcgaaattctgtctcggtaggacatggatttctattactatgaaattcttaaattagttaatgggagggctaccattatcctttttcttgtatgtgttcctaagagaaggaatttgtccatttcatgtttcgaggtctcaaaaaaagggcgtggaaacagatagaaactcttgaatggaaattgaaaagaaatgtagccccagttccttcagaaatggtaagatctttggcgcaagaagaaggggcgatccatatcatcttgacttggttctgctttccctctttttttaagaataccgagtcgg

SEQ ID NO: 462955 - DNA, 400 bp, Sorghum bicolor
gcagttatttcatcaaaagaataaatatccttatatgcacaagacgttcactaactacgtactagagtgtgtcaaaattgcaaccctcacagggcatataggctactaaaacgatatttcctatagcaggttccctgacaacgtgtatctggtaactccgctaacataacagccttattaaatgcatataccccttatgaccatatgcttatggtgcatacaactataattgttaaagcgcctatggacaactaatggaatactgatggacttcgcactactatataaaatgatctggccactatgactaaacaagatctattcatcatgaacgaatatatctgtaactctgtaatctacagctgtgtgaagtatcaaaacaataacaacattgctcttt

SEQ ID NO: 462956 - DNA, 599 bp, Sorghum bicolor
tcatcaaatagatttttctgtaacaaaaacaattaactattaaacaaataagctattaaacaaataagctatgccaatgaaaagattggtcgtttttgggtagttataaaattctcatacttcttcgactcgaataacaaaagaaagaaattttttttgtaaagtaaaattaaggtctttgcttttacttatagcattctttcttttacctaaaagaaagaactcaaaataaaaaataagaaaagtacgatttcgaatccattctatccaacgaacagttcttaccttaaccttaccgaaatggatcattctagatatttaaagaatcacagatcgagatcgttttcgcttaaccaaagaaaagaaggacgcttcttttttactaataatacaagaaaacaaataatacaacaaaaatctatctctatcataaagggataggtgtcattttctatacagtgttttacctcattaaatttttttttcaatcaatttgaaagtagagtagacagaatatatgaatttatctctaatcctcacattccattgatttagaaatggatatttgcaaatcagataatacctaaatataaaaatag

SEQ ID NO: 462957 - DNA, 624 bp, Sorghum bicolor
cgctgcaagtgttcatcatgcatagattatttgcaccgctcctattattaccaaccagggggaaaatagataatgagcatgcggtaacaattccatgttgacccgaatcaatccgtatgctcccatctttaatagaattccggctaaaagcatacatgtactgtaatgcgcttccccatgggtatctggtaaccacgtatgtaaaggtataatcggcaatttgacagcataagcaataaggaagccaaaatacagtagtatttctaatgttgtagggtatgattgattaatcaatctttctaaatctaatccgggttcattggaaccatataatcccatacccagaactccaattaagaaaaaaatggaaccacccgcagtatacaaaataaacttggtagctgaatacagacgcctctttcccccccacatggataaaagtaagtaaacaggaattaattctaactcccacatgataaaaaaaagtaaaaggtctcgtgaagaaaataatcctatttgaccgctatacattggtagcatcaggaaatagaataaatgcgaattccgagtaacccgccaagccgcttaagtagctaaaggagtgataaatcctgtcaataaaat

SEQ ID NO: 462958 - DNA, 611 bp, Sorghum bicolor
tcatcacaacttagtgaattaggaggggttcttttgtgcataaaaagaaagagcagtgcagtctgtcaaacttgcatttgaaatgtgaaatatttatacaaagggggagagatcaagacaatgcagcagggttggttatctaattggctagttaaacatgacgtggttcataggtctttgggcttcgatcatcgaggatgtcgagactttggaggtaaaagcgggggattgggattccattgctgtcattttatatgtatatggttacaattatttacgttcccaatgtgcttatgacgtagcacccggtggatctttagctagcgtgtatcatcttacgagaatacagtatggtatagataacccagaagaggtatgcataaaagtctttgcccaaaaggataatcctagaatcccgtctgttttctgggtttggagaagtgccgattttcaagaacgcgaatcttatgatatggtgggaatttcttatgataatcatccacgtcttaaacgtatcttaatgcctgaaagttggataggctggcccttacgtaaggactatataacccccaatttttatgaaatacaagatgcttattgagtgataataa

SEQ ID NO: 462959 - DNA, 607 bp, Sorghum bicolor
tcatcatgatgatagaactaaaatagatatcttttgttttctactcacgcgagcccatatccttgcttttttatcaattgctaattccgaccttcctccccaatctgatattatagtaccggtgtatatagaaattcccttatggtctaattccgagcggtagtaaataccaggacttagcaatatttgattgatcacaattcggtatgggggatttattataaaggttcctaaggaattcattataggaatgtttccaatagaaatggtttgcttttgcacatcgaaaccaaaaattaatctcgcggatacatataattcggaagaataggtgagtgattcatacacagcattcctttcttttatcgagggttctagcaattgatatcctttcgcaaataattgaaatgcaatttcgtgatctggatctttaattgtgggaaacttctcaagttcttccgccaatccttgattaatgaatctacaaaatccctcgaattggatctgactaaatccgggtattggggacattccctcatttccattccggagcatttgaatcttaagtttcctatttatagaagaaaaatccattatcagctcactc

SEQ ID NO: 462960 - DNA, 548 bp, Sorghum bicolor
tgcataatgtacctattatatgtatatattaatgtacataatatatacatatatagagatatgtagagattttcttttctatatatcttgatctcgaagtttttttatggcgagatttaaaatcttgagaaaattaagaaaaataagaaaatctttcatattatctcttatcacttgcacaaagtataggtatttattattatataaataaatacatatacatatcatgtataataaaatacatgaacagagagttgacacacccaaaaattattatatatatcggatacatttgaagaggctaagttcataggtatgtaaacatgatctcgtacgactcaccaaaccaaagctcggaacggaagttccttttttttttaagaggagaacaaatatgtatcaattgttgaatcggatacaacaatgggccaaaaaggccaaaggggcaataagaactgctgttaaaaaaatgataaactttttttttatctttaggctattcacttttcacgtgctcagaatgttctgcagaattagggacttttttc

SEQ ID NO: 462961 - DNA, 511 bp, Sorghum bicolor
gcaagttgttcatcactgttcgtacagcagtatctacaaccccttttcgggctccgtagcaggaaattatatattctgtcaaagaaagtccctcgcgtaaattgctttgaataggtaaatcaatcatttgtccttgaggatccgccattaaccctctcatacctactaattggtgtacctgagatgcatttcctctggctcctgaaaaagacattagatagactggattagaaggatccgttattcgaaaattcgaattcatttcttgtttcaaatattcacttgtagcataccatatctcaacggattggcgtaatttttctaccgcgtgtacagctccataataatagtgtttctccaaaagaaaactctgttgttccgcgtcttggactaaccatcctttagagggtattgttaaaagatcctcgattcctaaagaaatcgatgtagtagtggcttgatggaagcccagagtctttatttgatccagtatatgggaggtatatcccat

SEQ ID NO: 462962 - DNA, 624 bp, Sorghum bicolor
tcatcatctatatgttaagatatctctgacaagggctatagctcagttcggtagagcaactcgtttacacgtgcgccaatgcttttcaagggaacttattatgcaatgaacataattgaccttgttgcaaaatcaatgtcttacttcatggattcgaaagaatagaagaacagtagcctgacaatgacaaacagccggttcagtccgattcaggtgccaattcaggtgcttactcaaatagaacccctattgatttgctagttgataaggtaaatatccagcccactcaatgctaggcgtaatgaggataagggcctccaaaaaacttcttttcgttctatgaactttaaggtgtatgaagtctcatagtaaactcttgcagcggaacgatagagactccatttcacttaggttgatttaatttaggccggaggcagacctaagtcaaggtaatcctcctttgaaacactttggtattgttcctagatagatcataagacaaataatcaatcagagcacagggagccatcttattatctttccctaaagaaaaactatggcgaattaactgatctttacatcagttgatgaaagagcccaatgcagaaaaatgcatggtgggtc

SEQ ID NO: 462963 - DNA, 328 bp, Sorghum bicolor
cagtagttcatcattggttccggactcctttatctttgatttgtgaaatccttgggtttagacattacttcgggaactcctattcttttttctttcaaaagagtagcaacataccctttcttttttcttatttccttcgataaagcatttcactcttctatagaaatcaaatatgaacaattgattcagatagacttttaatcaaaaaagtttttccaatcttccaaaattggactttttcttattttaaccttttgatttccatattaaggatagactgacaaagttggcctaatttattagttttcactaaccctagattctttcc

SEQ ID NO: 462964 - DNA, 622 bp, Sorghum bicolor
gcagttgttcatcatatagtaaaagaaaaaaagtaaaaggaaaaaacctacgaatctttcatgcttaaaaaaggtgcgagatgcttcaatcgagatccttcaaaaaaaaaaaaaagaacataaaaaattttctaagaataagaaaatagtataaatggaaaatgtgcgatatgttgtgaatagcttcgtgtaagaaagtctaattttcttatgttctaattttcttatgtatagaactttctttttactcataatttctagtagaatagaaattatgagttactataatcgccctttctattatactggaatagaacatagtagaatagaacgactctttcttactttcttaaaagagtttcttacaagagtgaaacaaaactaaagaaagaaaaaataaagtttggcaaaattattaatgcaaaacgatcaattaaagaaaagagttgatactacaattcgactactcaatcaattggtagtatccctagagtccactcctcccccatactactagcgaaagagaaaatgtaaagactaccattaaagcagcccaagcgagacttactatatccatgtaaattatgtcttctatttttatgaaagaattcttctactattg

SEQ ID NO: 462965 - DNA, 632 bp, Sorghum bicolor
gcaagttgttcatcatttcttaccatcaagttagaaaaaagcctcgatttctggaattccttatttctatctcatgcaaaagaagaggatccaaggcaaagacgagaacaataaaagcaacaagtccttttaggaggaattgtgggtcttcttaatcctctattgggcacaagaaaaaggcaaaaaagcctttttcttgtgtcgattcttcttgtatcgaagtaagaatcatttttcttcttatttgttttgtcaaagattactatttattctttattcaggtctgtcttttggacttcctttgcttaggttcgggcgcggtagtggacaaacagagggaaagaaagtatggcgggggacaaatttcttgtgagcaaatagaattgcttgactttttcaattaagttcaactttgaacttacagaaattttgtaaaaaaaaatctataccctcccatggaagggtggttttgatttttaggctagttgagtagttttgattaaggttttattagtttattactctaaactaaatcaacgatttgcaggatacttccttcatggaataaaatactggatcctctcccctctttcttgttgcttcataagagtgaatccattttatgggcgaaa

SEQ ID NO: 462966 - DNA, 620 bp, Sorghum bicolor
ctaataatggggaagaggactgaaacatgccactgaaagactctactgagagggaagatgggctgtcaaaaaggtagaggaggtaggatgggcagttggtcagatctagtatggatcgtacatggacgatagttggagtcggcggctctcctaggcttccctcatctgggatccctggggaagatgatcaagtgggggggggcgaatagcttgatgcactatctcccttcaaccctttgagcgaaatgtggcaaaaggaaggaaaatccatggaccgaccccattgtctccaccccgtaggaactacgagatcaccccaaggacgccttcggcgtccaggggtcacggaccgaccatagatcctgttcaataagtggaacacattagccgtccgctctccggttgggcagtaagggtcggagaagggcaatcactcgttcttaaaaccagcattcttaagttaagatcaaagaagtcggcggaaaaaggggagagctccccgttcctggttctcctgtagctggattccccggaaccacaagaatccttagaatgggattcccactcaacaccttttggtttgggattttgagaagatttgtttttgaagagacagacga

SEQ ID NO: 462967 - DNA, 493 bp, Sorghum bicolor
tcatcaaatcgaaagggcgattatagtaactcataatttctattctactagaaattatgagtaaggggaaagttctatacataagaaaattagaacataagaaaattagactttcttacacgaagctattcacaacatatcgcacattttccatttatactattttcttattcttagaaaattttttatgttcttttttttttttttgagggggctcgattgaagcatctcgcaccttttttaagcatgaaagattcgtaggttttttccttttactttttttcttttactatagtctattctagtctattctcgtattatttttctccccctccttggattctttcaatgaagaattatcttcgatttttttgattttgacttgattgaaattaagtggatgcagtgaaaaaagaagttgaattagactactatttcaatctactaatcgattctatgtagattcaagataatataatagaaagaatctaaa

SEQ ID NO: 462968 - DNA, 594 bp, Sorghum bicolor
gcaagttgttcatcaggcaatcactcgttcttaaaaccagcattcttaagttaagatcaaagagtcgggcggggaaaggggagagctccccgttcctggttctcctgtagctggattccccggaaccacaagaatccttagaatgggattccaactcagcaccttttgttttgggattttgagaagagttgctctttggagagcactgtacgatgaggggggggagctgtgttcgggggggagttattgcctatcgttgtcctctatggtagaacccgtcggggaggcctgagaggcggtggtttaccctgtggcggatgtcagcggttcgagtccgcttatctccagcccgtgaacttagcggatactatgatagcaccgaaggttgccaattcgtcagttcgatctatgatttcgcattcatggacgttgataagatccttccatttagtagcaccttaggatggcatagccttaacgttaatggcgaggttcaaaagaggaaaggcttgcggtggatacctaggcacccagagacgaggaagggcgtagcaagcgacgaaatgcttcggggagttgaaaataagcatagat

SEQ ID NO: 462969 - DNA, 558 bp, Sorghum bicolor
cttgggagtttcgggaagaaattggaatggaataatatcgattcatacagaggaaaaagttctctattgatgcaaacgctgtacctagaggatagggatagaggaagagggaaaaatcgaaatgaaataaataaagaataaagccaaaaaaataagtcgaagatagaagagcccagattcaaaatgaagaaatggaaactcgaaaaggatccttctgattctcaaagaatgaggggcaaggggattgataccgagaaagatttcttcttattataagacgtgatttgatccgcatatgtttggtaaaagaacaatcttctcctttaatcataaatggaaagtgttcaattagaacatgaaaacgtgactcaattggtcttagttagtcttcgggacggagtggaagaagggcggagactcccgaacgaggaaaaggatcccttcgaaagaattgaacgaggagccgtatgaggtgaaaatctcatgtacggttctgtagagggacagtaaggatgacttatctgtcgacttttccactattaaccccaaaaacccaac

SEQ ID NO: 462970 - DNA, 575 bp, Sorghum bicolor
acagctaattcattaaggctatgtttataccgtgtatcaatggtcaattatgagtagaaggttccatcggaacaattattatttatttcaagctatttcggctctttcttaatcttcaaaaagaaattaattccgtaatggtaagacgaaaaaagaaaaaataaaaaggaagtgtggaaaaaatgacaagaagatattggaacatcaatttgaaagagatgatagaagcgggagttcattttggtcatggtattaagaaatggaatcccaaaatggccccttacatctcggcaaagcgtaaaggtactcatattacaaatcttgctagaacagctcgttttttatcagaagcttgtgatttagtttttgatgcagcaagtcagggaaaaagcttcttaattgttggtaccaaaaaaagagcagcggatttagtagcatcagctgcaataaggtctcgttgtcattatgttaataaaaagtggttcagcggtatgttaacgaattggtcgattaccaaaactagactttcttaatttagagacttaagagcagaagaaaaaatgggaaaattccac

SEQ ID NO: 462971 - DNA, 549 bp, Sorghum bicolor
tcatcagcaacaaattcgtccagacttttggtagagtctagaagaccacgactgatcctcaaaggtaatgaatggaaaaaatagcatgtcgtaataaaatcaatttctttttttttataaaaaaaaagaaattgattttctgggtctagtgaataaatggatagagcctggctctaattctggtaaaataaaaaaaaaagcaacgagcttaacttcttaattggttaattggaaggattccccgatctaattagacgttaaaaatagattagtgcctaatgcagggaaaggttaggttttcctatgagtggaccctttactttttttttagaaatcctaattattcttgattatggattgaaaagggatgttatgacttgaatgtgtaaaagaaacagtatattgataaagagactgtattccaaagtcaaaagagcgattggcctgcaaaaataaaagattagttcttggttgttttgtaattagaacaaacataaactaattagatagaaaaggagcggaaaaagttctatggattagactcccttt

SEQ ID NO: 462972 - DNA, 487 bp, Sorghum bicolor
tcatcagtatctatgaagtgggaattcttacaggatctatttgacatccaatatgaaagaaaagaagtacccccctatttattttccaaaaactaaagaactaaagtaagtaaaaaaaaaaagagggggagtattctaattctatgtttcatggccagattaaagagtaggatgtttttagtttcagcacaggccttaaaacttttgaccaagatcggcgcgaaaaaaagaaaaaggtttccattctacggatagggactctatttttatattttaggtattatctgatttgcaaatatccatttctaaatcaatggaatgtgaggattagagataaattcatatattctgtctactctactttcaaattgattgaaaaaaaaatttaatgaggtaaaacactgtatagaaaatgacacctatccctttatgatagagatagatttttgttggattatttggtttcttgtattattagtaaaaaaga

SEQ ID NO: 462973 - DNA, 595 bp, Sorghum bicolor
tcatcacttcttatcaagtagtgggaagaccataagtattcctttagttgcccatcggcgctctaacaaaaatacttgtatgcaccaaaaacctcgggttccgcggggtaaatccattaaaaaagggcaaattttagcggagggagcagctacagttggcggggaacttgctttaggaaaaaacgttttagtagcttatatgccctgggagggttacaattttgaagacgcagtactaattagtgaacgtttggtatatgaggatatttatacttcttttcacatccgaaaatatgaaattcagacggatacgacaagccaaggctccgctgaaaaaatcactaaacaaataccacatctagaagaacatttactccgcaatttggacagaaatggagttgtgaggttgggatcctgggtagaaactggcgatattttagtaggtaaattaacgcctcagatagcgagcgaatcgtcgtatatcgcggaagctggattattacgggctatttttgggtcttgaggtatccacttcaaaagaaacttctctcaaactacctataggtggaagagggcgcgttatcgatgtgaaatg

SEQ ID NO: 462974 - DNA, 577 bp, Sorghum bicolor
  unsure (1)..(577): unsure at all n locations
tgcagtttttcatcaaaaaggtaatcctagaatcccgtctgttttctgggtttggagaagtgccgattttcaagaacgcgaatcttatgatatggtgggaatttcttatgataatcatccacgtcttaaacgtatcttaatgcctgaaagttggataggctggcccttacgtaaggactatataacccccaatttctatgaaatacaagatgctcattgagtgataataaattcatgttcacttatacaacacaattccagattttattaaagtaaaggaatattttgaggttctgttcctagacgaaacgaaatacttagaatataatattctaattaattcctattatacaaaaaggtccagatagactgaacaaaaagggcttcatttcgattttccaatttggaaaatcacatatttgtttccttcgtatgaacagaaaaatacaatgactcaaagaaggtcctaccacgaactttgtaccgngcatattacttagaacaactaggaaagtaggataagcaagaataaaaaaaatattcttcggaatagcggcatacaaaattaataagaaat

SEQ ID NO: 462975 - DNA, 649 bp, Sorghum bicolor
tcatcaaagcttttattggtacacttgaaaggtaccccagaaaatcgaagcaagagtttgttaattggtttagacgaatcctttgtggttgagtccaaaaagagaaaaaatattgcgagaaattgacaaggtaagatttccatttcttcttcaaaagaagagtgccttttgatgcaagaattgcctttccttgatatcgaacataatgcataagaggatccataaagaaccatatggttttccgaaaaaaccccgggtacattacaccaaaatgttccatcttcccagaaaagatgattcgttccagaaaggttccagaagatgttaatcgtaagcaagaagattgtttacgaagaaacaacaagaaaaattcatattctgatacataagagttatataggaatcgaaatagtcttttattttcttttttcaaaagaaaaatggatttcattgaagtaataagactattccaattcgaataatagtggagaaagaatcgcaataaatgcaaagagggaacatcttgaatccggtattcaaggagttgaaccaggatttctaaatggataggatagggtatttctatatgtgatagataatgtaaatgcaaaaatttgtcttctaaaaagggaaatattgaatgaataga

SEQ ID NO: 462976 - DNA, 561 bp, Sorghum bicolor
ttcgctcggagggtagcagccgtctttttatggtggatggataaatgtttagattctgtgattattttttacaaggagttgttgaatatcaacaacttattacacggaatcccatttttttagaacgagttgaaggagtcggttttattagcggagaagaagctgtaaattggggcttatcgggaccaatgttgcgagcttctggaatacaatgggatcttcgtaaaatcgatccttatgagtcttacaatcaattcgattggaaagtccaatggcaaaaagaaggagattcgttagctcgctatttagtacgagtcggtgaaatgagggaatccataaaaataattcaacaggctgtagagaaaattcctggaggaccttatgagaatttagaagcccgacgctttaagaaagcaaagaatcccgaatggaatgattttgaatatcgatttcttggtaaaaaaccgtcgcccaattttgaattatcaaagcaagagctttatgtaagagtagaagctccaaaaggcgaattaggaatttatctggtaggagatgatagtc

SEQ ID NO: 462977 - DNA, 475 bp, Sorghum bicolor
  unsure (1)..(475): unsure at all n locations
ctacctcctttctttttcatgtattttttttatcaggaaaaataaagaattggtcagttatttttaaattattctaatctcgtacacacaaaaatttgcaattattcatctactgctggaatctggaatttggatttattttatcgatgcaaattggatttggatagaagggtacattcttttattttatatagggggggggtgcttctatctaaaataaaaaaattttactnatttatttattgctatatccaatttatanaattnatataccatttaattnatatcatttaacaaaatnaaacacannatatncatccatctttnnnctcnaaaatttcacnnnatananatatannataaaaaatannctattaantaactctaaataaattntnnatacatctntatccttaacatactnaaaccactnccattattcccatcaaaccaatanccattcataaaaactaaa

SEQ ID NO: 462978 - DNA, 459 bp, Sorghum bicolor
  unsure (1)..(459): unsure at all n locations
ttatgcagctnaagcatcctgactagcgaacaataaaaaccttnttcctacacgacctgatcaaatcnatcaggcacttgccatctatcttcattgttcaactctttgatgaaaagaaaagatgaaaaaaccaaaaaaaagctctgcccttccattttttttataaagagggggggannncanantcctttnntntccattccaattaaaaattnnnncttcacaattactanccaatatttctctcatnccttttcttcttcatttttcaatattctnntntcctaaacntanannaaccacaccaatccatcccnaatttnnnnnttaaactctactnnnntnacnatactttannnnanntnctncnnnaaaatanctnnatnccanaatnataaaaancttaacacctcttattttactttttcactattttnaaatacnaaaaaaatccaaatc

SEQ ID NO: 462979 - DNA, 630 bp, Sorghum bicolor
gcaagttgttcatcattttcagctatttgtaattcgcgatttaatcacgaaacgtgctacttctaatgtcaggggtgctaaaaggaaaatttgggaaaaggaacccattgtatgggaaatacttcaagaagttatgcggggacatcctgtactgttgaacagagcacctaccctgcatagattaggcatacaggccttccaacccactttagtagagggagggactatttgtttacatccattagtgtgtaagggtttcaatgcggactttgatggggatcaaatggctgttcacctacctttatccttggaagctcaggcggaagcccgtttacttatgttttctcatatgaatctcctgtctcccgctattggagatcctatttgcgtgccaacccaagacatgcttatcggactttatgtattaacgattggaaaccgtcgaggtatttgtgcaaatagatataatagttgcggaaactctccaaataaaaaaatcaactacaataataacaattattataagtataccaaagataaagaaccccatttttctagttcctatgatgcactgggaacttatagacagaaacgaatcggtttaaacagtcccttgtggctccgatggaa

SEQ ID NO: 462980 - DNA, 659 bp, Sorghum bicolor
  unsure (1)..(659): unsure at all n locations
gcaagtagttcatcaactcatcaacctcaaaaaaagcggaattaatttaatgaattaatagatttttctgtaacaaaaacaattaactattaaacaaataagctattaaacaaataagctatgccaatgaaaagattggtcgtttttgggtagttataaaattctcatacttcttcgactcgaataacaaaagaaagaaattttttttgtaaagtaaaattaaggtctttgcttttacttatagcattctttcttttacctaaaagaaagaactcaaaataaaaaataagaaaagtacgatttcgaatccattctatccaacgaacagttcttaccttaaccttaccgaaatggatcattctagatatttaaagaatcacagatcgagatcgttttcgcttaaccaaagaaaagaaggacgcttcttttttactaataatacaagaaaacaaataatacaacaaaaatctatctctatcataaagggataggtgtcattttctatacagtgttttacctcattaaatttttttttcaatcaatttgaaagtagagtagacagaatatatgaatttatctctaatcctcacattccattgatntagaaatggatatttgcaaatcagattatacctaaaatataaaaatagagtccctat

SEQ ID NO: 462981 - DNA, 567 bp, Sorghum bicolor
gcagttattcatcaaactacttcaacaagtctacgtgtaagatagccagcatccgctgttcgtacagcagtatctacaaccccttttcgggctccgtagcaggaaattatatattctgtcaaagaaagtccctcgcgtaaattgctttgaataggtaaatcaatcatttgtccttgaggatccgccattaaccctctcatacctactaattggtgtacctgagatgcatttcctctggctcctgaaaaagacattagatagactggattagaaggatccgttattcgaaaattcgaattcatttcttgtttcaaatattcacttgtagcataccatatctcaacggattggcgtaatttttctaccgcgtgtacagctccataataatagtgtttctccaaaagaaaactctgttgttccgcgtcttggactaaccatcctttagagggtattgttaaaagatcctcgattcctaaagaaatcgatgtagtagtggcttgatggaagcccagagtctttatttgatccagtatatgggaggtatatcccattccgaaatgatctatt

SEQ ID NO: 462982 - DNA, 542 bp, Sorghum bicolor
tcatcattagtacattggtatttgcttatgtaattctaagtatatcaatactttactcctatttataatattatttattttttatattattccggaaattttgtatttatcgggacagacaataccctaggaaccccaagaagggctgatttgagcatgatcaatttagaggatatgctcgccctcttccttcccgtccttagtttaggacagtggaaagtatttttccttttattttaggaattttgggaacatttcaacaaaggagatctttcacaggtcaaacgagacctaagatttaatctaaaagaaattattagattgaatccatttgcattaaaaaaattgcattaaaaaaaccgatcaaaaaaggacgagcgaagtaagtgatcgaaaaactttcttctttgttcgtcctatctataagaggagagcatatgaaaaatgtaacccattctttcgtttttttagctcactggccattcgctgggagtttcgggcttaataccgatattttagcaacaaatctaataaatctaact

SEQ ID NO: 462983 - DNA, 219 bp, Sorghum bicolor
aaatacatatgtcgagctctaataggagcagatccataagtaagaagcgattgaaaaaacagagcatcaccaacatctatcgatagcccagactcgcatggatcgaagaagagggagctgttgctggactcttcctctatcgggaggaagcttaacatgcaaatgcggcccagtggaacggacgtaaagtccacaatacccgggatgaatcaagatcca

SEQ ID NO: 462984 - DNA, 627 bp, Sorghum bicolor
  unsure (1)..(627): unsure at all n locations
tgcagttgttcatcaagcataaaggaatttgcgctcttcatatacccatatggctggatagtaattttgcagtgatatacttcttatctgttttggtgagagattcaaacaatttttagcaggcatctcttggaaaaactttcgagttcaaaactttttaatttttcttaaaaagttttggacggatttgttgaaacgattttcaacaggtaccccttggaaatggggtacttgactattctacaaggattctagtggatttggaacaaactatgttggagttttatcaacaattttattctaaaaaaaagttgggagtcgaatttatactgcagagtataaaaattatactactgcctgcccaacaaaaaataaaaagcatatcctacatacctaactcctccaggttcagggttttccgtttccgaacactaggaaaagggaggattctagattttgatcctagggttaaaaggaaggggacagatacccaatatgattcttaggaggaacgtttggtaatggttctctatgctctnttttatgtgttcttagttctattcatcttctttgattcttttaaacaagaatctaataaactagaattgagcggaaaagaagagagga

SEQ ID NO: 462985 - DNA, 637 bp, Sorghum bicolor
tgcagttatttcatcatgcagggactgtggtatcgaattttttcattcgagtatctattagaaaagaattctccagcatttgattccttactaacaaagtatttattggtacacttgaaaggtaccccagaaaatcgaagcaagagtttgttaattggtttagacgaatcctttgtggttgagtccaaaaagagaaaaaatattgcgagaaattgacaaggtaagatttccatttcttcttcaaaagaagagtgccttttgatgcaagaattgcctttccttgatatcgaacataatgcataagaggatccataaagaaccatatggttttccgaaaaaaccccgggtacattacaccaaaatgttccatcttcccagaaaagatgattcgttccagaaaggttccagaagatgttaatcgtaagcaagaagattgtttacgaagaaacaacaagaaaaattcatattctgatacataagagttatataggaatcgaaatagtcttttattttcttttttcaaaagaaaaatggatttcattgaagtaataagactattccaattcgaataatagtggagaaagaatcgcaataaatgcaaagagggaacatcttgaatccggtattcaaggagttg

SEQ ID NO: 462986 - DNA, 578 bp, Sorghum bicolor
  unsure (1)..(578): unsure at all n locations
gcaagttgttcatcacgatctacttctttttggtattttagactaaattcttttgttcctcgatgctcaataaaaccctctttttttaagatagaatcttcctccgggctcccatattcgtcttctgagtcttcctctgagtcttcctctgagtcttcttctaaagtcccatattccttctctgagccatcttcagagctcccatattcttcttctgagtcttcctctaggatttcatattcgccctctccctctcgggtcctatatttgttctctaggctcccatattcttcctctgagtctttctctagagtcctatattcgtcctctaggatcccatactcatcttctagggtttcatattcgtcctctagagtcctatattcgtcttctaggatttcatattcgccctctccctctcgggtcctatatttgntctctgggctctcatattcgtcttctgagtcttcctctcgagtcctatacttttcctctcgggtccgatattcttcctctagggtcctatatctaaaattaaacattcctgaaccccttttatcttttctggatcggggatc

SEQ ID NO: 462987 - DNA, 201 bp, Sorghum bicolor
caatattctaaagtgcagccggatagatccaatctattcttgaaatagacaactcgcacacactccctttccaaaaaaaatcaatacaccaaccactacagttagatttattagatttgttgctaaaatatcggtattaagcccgaaactcccagcgaatgggcagtgagctaaaaaaacgaaagaatgggttacattttt

SEQ ID NO: 462988 - DNA, 535 bp, Sorghum bicolor
  unsure (1)..(535): unsure at all n locations
tgtgttctgaaagggtaccaataagtaatcgacggnnatttctanagatnantactcaaaaaaatcnccacaatacgcccggacaattagaattaagaaaattttgtcgttattgtcgaaagcataccactcataatgaaataaagaaataggagcatcgtgtgttcgatttttccaaagaatttttttaagtaagaggtggttattaaatatatanaacatgnatagaatacaaaatacaaatcaactaatctcattttangtanatattatttcatatntatanannntttttatttttatatattttnattttttatatttttatatantatattaatcaaataatatatnnaccaaanaaanactacttctttntnnntctttatcaaaaattaataaaataaanaaatttttttttttttcaaattttaaaataannaataaatcatttatatatttaaacaaccttttcntaaatctaancaaccctttcnnaaatccaaacaaactttnnataaaactaaacaacctt

SEQ ID NO: 462989 - DNA, 544 bp, Sorghum bicolor
gtattagaatgaaaagaccattaattatataaggaagaacccagggtgctagggcattcccattcctaaatcactaattcgtagtgcttttgcctttcttgcgtactcctgatgaaccagttgctagccatatgtttaggaggcttttttctccaggtactggtactaagccgctttgccatcttttcatcttcggggggtggggaattctcgacgtgaaaacacagagacaaaggcctgatctttgaataggaaaaagaatggatccgaaggtcccaaatcaattggcttattcgaaaaaagccttcttctttgaaagatatatctcgtgtctggtactgcattgttccactctgcaagaagtccgaatcagtctcttgcacctccccctttttatgataaatataccagaaataattcgaataaatagcagtctctgacaactcatcctctttaatctgcttggacccgctccaatacccataggaaaatccccagtcatattcagcggacctgtcccttcaatcaaatagattggcccaag

SEQ ID NO: 462990 - DNA, 583 bp, Sorghum bicolor
  unsure (1)..(583): unsure at all n locations
cccaaacggttaccaatagggatgaggtagcgtttccttattcttttattaatttaaatcgattcgattcgggaatttaaaactacgagactaagatgtcagaaatcttcgtagccaaaggtccctaaggggcagtcttttttcaatctaagattgaagaagggactttgcgaagaaatagaaagacttcctaattatcatacattttatttatcgtacatcttactacatacacttagtatatcttatgctacctacatacactaaagtaaaggctactgattctgtcgagaattagattgaataggctgatcaaaaatcaatttttggattgtggataagacctccttactctttcatagaaagatagaaagcggggcagcagnagggtttaggtcaaaaataaaaataaacatgggtaagttaggtatccaataaatatttatttatcctaattttatggtatattcttacgtcccttggttataaaaaaggtaacaaacgaaagaaaaaaactctttattcccgcgtcttctattcaaagcttccctactcttttttagggaaagagcgaggntcatat

SEQ ID NO: 462991 - DNA, 636 bp, Sorghum bicolor
  unsure (1)..(636): unsure at all n locations
gttttatgagacactaataaacactattatttttatatattattcgtcaatcccacttcaattacctaaaaaatgagggatattttcttgctaggattcgagacatgcagataatatagaatccaaaaaatgcattgatcattacatagaattctattaagatattatatgaaagtcgaatttcttccattctcatttgagaatgcgaatacaaggaggtattttgtgtttgggaaagtccgaagaaaaaaggatttggaatctaccttttcttttgctttttcccttagaaaaataactcaatcaaaatccaattatctactctacaagaatgaaatgcttgttatgcctaatatacttagtttaacctgtatctgttttaattctgttctttgtccgactagctttttcttcgccaaattacccgaagcttatgccattttcaacccaatcggggatgttatgcctgtcatacctgtactcttttttctattagcgtttgtttggcaagctggtgtaagttttcgatgaaatctttactattctgcctgccaaattggatgatgtattcattccaaaaaaaaaatggataagagctgagaaagctatattatgaaccttngattctaaaaacaa

SEQ ID NO: 462992 - DNA, 559 bp, Sorghum bicolor
gatttacacaaacctctaatgattagaaactaaaaacgagatctcgaagtaattggaacgatttcgattatcatttatttgtacttattagttacttctacccgatagagcttagaagttggaagtaataatttcttggttgattgtatccttaaccatttcttttttttttgacacgaggaactcaccatgaatccactaattgctgctgcttccgttattgctgctggattggccgtagggcttgcttctattgggcccggagttggtcaaggtactgctgcaggacaagctgtagaaggtattgcgagacagccagaagcagaaggtaaaataagaggtactttattgcttagtctagcttttatggaagctttaacaatttatggactggttgtggcactagcgcttttatttgcgaacccttttgtttaatcctaaaaaagaaaatgagtcctttagattagatacttttttctttttttagtacattggtatttgcttatgtaattctaagtatatcaatactttactcctatttataaaaataattattttt

SEQ ID NO: 462993 - DNA, 596 bp, Sorghum bicolor
  unsure (1)..(596): unsure at all n locations
ataacaaataaagaatctttttttttttcaaattttaaaataaggaataaatcatgtgtgtatctaaacaaccttttcgtaaatctaagcaaccctttcgtaaatccaaacaaacttttcataaatctaagcaaccttttcgtaaattcaaacaaccttttcgtaaatccaaacaaccttttcgtaggcgttctcgaataggcccgggggatcgaattgattatagaaacatgagtttaattaatcgatttattagtgaacaaggaaaaatattatccagacgaataaatagattaaccttgaaacaacaacgattaattactgttgctataaaacaggctcgtattttatctttcttaccatttcgtaactatgagaatgagaagcaatttcaagcccaggcaatttcaataattactggtcctagacacagaaaaaatagacatattcctcaattaacacaaaagttcaattccaatcgaaacttaagaaactccaaccagaatttaagaaacaacaatcggaacttaagttccgattgttgatgttttattcnaaaggcttagacttatatataaagaaagtaatccaatttt

SEQ ID NO: 462994 - DNA, 621 bp, Sorghum bicolor
tcaggaatccaaaagaaagattcttctattcattcaattcatttcaaataagacgtatcttgttcaagccaataaatagagctggggttatagttaaagcagccagtagaaaaccgaaataactagttatagtaagcatgaaggggttaaattccatttttttttactacactacataatgttttttaagcacttacgggagtttaagttttaagttatggaaaattcataattcattggttattttagataatactaaaaaacaagatagagtgagatacagaagtgtaaaaaaaaagagaaaatcgattcatcagacggaacatgagtccctaattccgaatcaagagatttgttgtggaatctgtcaattaagtaaactaataatattaagaactagatcatctaacgccattgaaaaatgaaattggattttcgggggaattttggaataaaagataaataaagaatttaatttgaaaaaaaaattctttctatttcggattatttctcttttaataggatggatttcatcctctttttggagcaaacggtcgaatattcccctattccttcttatcttaacccaattgattccatatggaataagaggagaagaaa

SEQ ID NO: 462995 - DNA, 516 bp, Sorghum bicolor
  unsure (1)..(516): unsure at all n locations
tcatcacactataggagcaactgttcatggtcattatggaaaaatcctttacaaaggagagagggtagttacgtttatatatgaaaaatcgagatccagtgatataacgcaaggtcttccaaaagtagaacaaatcttcgaagcgcgttcaattgattcactatcgccgaatctcgaaaggagaattgaggattggaatgaacgtatacgggggattcttggggttccctggggattcttgattggagctgagctaaccatagcccaaagtcgtatctctttggttaataagatccaaaaggtttatcgatcccaaggggtacagatccataatagacatatagagattattatacgccaagtaacatcaaaagtaagggtttncgaagatggaatgtctaatgtttttttacctggggaattaataggactattgcgagcggaacgagcagggcgggcttttgatgaatcgatctattatcgggcaatctcctcgggactacaagggctttcctg

SEQ ID NO: 462996 - DNA, 494 bp, Sorghum bicolor
  unsure (1)..(494): unsure at all n locations
gtacagnatgntcatcacactactgtggtttgacttagctttagttcttgagatttttggaaaataaacaggggggagcggggaatactttgatattgaacgtcaaatagatgcagcgagaaatcccacgatatagatagcggtgaataaagccgatcaaaaaagctccagtatcaaaccacatattgacatcacatatgagtactgagaattccgggcatatggcgggggtgcctgatagacacaaatttttcattgaaaataaagatgttaaatctgactggacttgacactatattactgggtttctgagcaagacaaaaatgcttagctatgcatcccatccacgagtgcataagagagaattattgctatctaataaactttagtgacgagcaaggcacaatacgactctatctaccgcttcatcagaaacaatgtggggcggcagggtccgatccttccagtgacggaaccaaaccccagtggctcac

SEQ ID NO: 462997 - DNA, 366 bp, Sorghum bicolor
tttttatttggagagtttccgcaactattatatctatttgcacaaatacctcgagcgggggcaatcgttaatacataaagtccgataagcatgtcttgggttggcacgcaaataggatctccaatagcgggagacaggagattcatatgagaaaacataagtaaacgggcttccgcctgagcttccaaggatttaggtaggggggggggcatttgatccccatcaaagtccgcattgaaacccttacacactaatggatgtaaacaaatagtacgtccctctactaaagtgggttggaagggctgtatgcctaatctatgcagggtaggtgctctgcccaacagcccaggatgcccccgccataac

SEQ ID NO: 462998 - DNA, 509 bp, Sorghum bicolor
  unsure (1)..(509): unsure at all n locations
ggtacagtagttcatcatctccaacattattccaataattacatatccgatttgccctatggacgaatatgcaagcatacgtttcatgcttgtttgagtaatagcaaggagattccccaatatcatgctaagaatagctaggatttccagaagaagatgccattcgtttgatgagaaataaaaaggaatatcgagaattcgcgtggctaaagctgaagcagctactttcgaagtaacagaaagaaaagcaacgactggagtgggggagtcagagtcgaaaagaggattcctcgcttctttctctcatgcaaaaccgtgcatgagactttcatctcgcacggctcctaagtgataaaagaaagaagaactcgncttctttcttttttgattaccttcctcgcgtatgtataagaccgaatccattctttttcgaaatggatttcgaaaaaaaactactaatccttaacttttnnaggaatcctttatcagngggtgggaatgactgactt

SEQ ID NO: 462999 - DNA, 327 bp, Sorghum bicolor
  unsure (1)..(327): unsure at all n locations
catcagacgcctctactgagacaaaaagatgggctgtcaaaaaggtagaggaggtaggatgggcagttggtcagatctagtatggatcgtacatggacgatagttggagtcggcggctctcctaggcttccctcatctgggatccctggggaagaggatcaagttggcccttgcgaatagcttgatgcactatctcccttcaaccctttgagcgaaatgtggcaaaaggaaggaaaatccatggaccgaccccattgtctccaccccgtaggaactacgagatcaccccaaggacgccttnngcgtncaggggtnacggaccgacca

SEQ ID NO: 463000 - DNA, 510 bp, Sorghum bicolor
gtacagttgttcatcaattaaaatattccaaaattaagaatgggtttagctacttaaattcaaaaagtgaatcaaagaatttcagtatctagttattagttaaaaaaaaatatatttattaaaatacaaactaatcatttttgtatttctttctgttaaaataaaagagctctgttgtttcgtaattgattgattggattccaaagaaaacctatatttatgggaaattctcgaatattgcttatttcatataaaaggaaatcctaatgactagaattctctaagttttagaatgtcttgtttaagagacttggaattcaattatgcaatagctttctgaacttaattaactatttgaattgaattttaccttccttctttttatgcccccctcttatatgagggcttatcccccataccatatatttatatatggagtatatttgatatataaattgattcaaatagaaaatcttaaaaaactcttgtcttatccacattagacaaaat

SEQ ID NO: 463001 - DNA, 595 bp, Sorghum bicolor
  unsure (1)..(595): unsure at all n locations
tcatcaaatttgttgcttcatccaaatgtgtaaaagatcatagccgcacttaaaagccgagtactgtaccattgagttagcaacccagataaaataggatctcttagatacgatcaaaatctaaaaatcgatgaaattacaccggacgctcctgtcaaaacattgaattagcaagacatcaaaagaaagattttctaatccattaaaagggtgaaataccaaaatgaacagatccggttcaatttcactaaggctaagagcagccccaatcacaatggcaaaattgtgatttttttggcaatttttatttaaagaagtaaaataatcttgtatgagagtacatgcaagaggggcaaccctatcatttgaacgaagtgtagacagaaatacctaatatggagtgacaataaagagacccatctatctacaaattctatttgttcaatagacctttgtcaatggaaatacantgtaattagatagaaaaaggaaataaaatagggacttttgttggattggcacgatataaatgcagcaaaaaaaaataggactaagaaagaagcacattgtgtctaaataaattagggggactaag

SEQ ID NO: 463002 - DNA, 513 bp, Sorghum bicolor
  unsure (1)..(513): unsure at all n locations
catcaaaacaatcatttgtccttgaggatccgccattaaccctctcatacctactaatgggtgtgcctgagatgcatttcctctggctcctgaaaaagacattagatagactggattagaaggatccgttattcgaaaattcgaattcatttcttgtttcaaatattcacttgtagcataccatatctcaacggattggcgtaattggggtaccgcgtgtacagctccataataatagtgtttctccaaaagaaaactctgttgttccgcgtcttggactaaccatcctttagagggtattgttaaaagatcctcgattcctaaagaaatcgatgtagtagtggcttgatggaagcccagagtctttatttgatccagtatatgggaggtatatcccattccgaaatgatctattaatctgctaataagcccgttcatagcagntccgtctatctttttattatgaaagaccaggttggccccgtctgccatactaaggaccccccctttttg

SEQ ID NO: 463003 - DNA, 364 bp, Sorghum bicolor
  unsure (1)..(364): unsure at all n locations
atggagtagataattcttccttgttacaatagaaaaaacccctccccaaatcgtgcttgcatttttcattgcacacgactttccctatgtagaaatagccgatttctattccgaagaggaagtccactaatttttagaatttttaattagttaaagtgattcacctactatggaacatttcagaatggaaaatgtgcaagttttatcttgatatcgatcttttctagtttattaattttgtctaatgattaattaagagtaagaggattcaccaggtcattgatacggataatatccaaataccaaatacgctcactttgtgatccatgnaaagaaaagngaattggtttgggnttggggaaca

SEQ ID NO: 463004 - DNA, 277 bp, Sorghum bicolor
  unsure (1)..(277): unsure at all n locations
cacttatcatgagatttatgcccactatctagtagtgggaaatagaaaaaaagaggtgcgtgctatatacattcgaaccactcttggtcatatttctttttatagagaaatagaggaagccatacaaggatttagtcgggcctattcatacactatctaaacaaggaagtgaaattcggcgatgcccctttcggggggcattgggggggggctagtaccatcttttttgccncncaaatccaaattnanattnannaaannnantaaataaantttt

SEQ ID NO: 463005 - DNA, 287 bp, Sorghum bicolor
  unsure (1)..(287): unsure at all n locations
atcaaatggctgttcacctacctttatccttggaagctcaggcggaagggcggggcttatgttttctcatatgaatctcctgtctcccgctattggagatcctatttgcgtgccaacccaagacatgcttatcggactttatgtattaacgattggaaaccgtcgaggtatttgtgcaaatagatacttttagtgtggggggggggtccaaataaaaaaatcaactacaataataacaattattataagtatacnaaagataaanaaccccatttttctaattccta

SEQ ID NO: 463006 - DNA, 315 bp, Sorghum bicolor
  unsure (1)..(315): unsure at all n locations
atgaattagtaactgcagccaatctccgaaaagtcccgattgtttcgatttttggaatgggatatttacggaatccccatgaataggatcaaaccttattccatgctatttccataagattcctctttcttattcttaagcaagcccccgagagggcttagttgatcatgatttctgttttctctttttttttttgcggggggtgntgnttcnaaaaagatatcgtccgattctccttctattgattctttgccgatcgagatgtatggatccatgtgtctacatacctagattctgggggtggattaacgaaaa

SEQ ID NO: 463007 - DNA, 266 bp, Sorghum bicolor
cgggtgtagaagtaggccaacacttctcttggcaaatagggggtttccaaattcatgcccaagtactcatcacttcttggttcgtaattactattttgctaggttcagttatcatagctgttcggaatccacaaaccatcccgaccgatggtcagaatttcttcgaatatgtccttgagtttattcgagacttgagcaaaactcagattggagaagaatatggtccctgggttccctttattggaactatgttcctttttattttt

SEQ ID NO: 463008 - DNA, 333 bp, Sorghum bicolor
  unsure (1)..(333): unsure at all n locations
catctaatctaattagtagtaagtattttcttttttatttaatagtctctgactatcattaaataaagggtagagctattcttttttctagagattctagagaaagtgagacaaagtgaagcgaaagagttttctttgtataagaattaggtctatatcatatctaaatagaaaggaaatcaaaaagaagggcagtggggattacattggatgaatccttaaggaagacatatcacaaaagaaacaaagcctaaagtaagcgctccttgcctttggtttgagcaaaacagattcttgtttcaccgangaaaagagagaaggtctggataaatt

SEQ ID NO: 463009 - DNA, 499 bp, Sorghum bicolor
tacagtatgttctcaatttttatatattttgattttttatatttttatatagtatattaatcaaataatatatggaccaaagaaagactacttcttctggttctggatcaaaaattaataaaataaagaaatctttttttttttcaaattttaaaataaggaataaatcatgtatatatctaaacaaccttttcgtaaatctaagcaaccctttcgtaaatccaaacaaacttttcataaatctaagcaaccttttcgtaaattcaaacaaccttttcgtaaatccaaacaaccttttcgtaggcgttctcgaataggcccgggggatcgaattgattatagaaacatgagtttaattaatcgatttattagtgaacaaggaaaaatattatccagacgaataaatagattaaccttgaaacaacaacgattaattactgttgctataaaacaggctcgtattttatctttcttaccatttcgtaactatgagaatgag

SEQ ID NO: 463010 - DNA, 402 bp, Sorghum bicolor
catatttcttgtattagcaggaattttgggtatattttgtgaaaaaaaagaaactccactcttcattgttgataaaacaaaatccctattgactcctttggatatactttttccccataaggatattgaatacaacgaaccttctttagtactactgtaattttgaaaattaacacgcaaatacccatcaaaagtaagtaaatatatccgaaacatataaaatgcagttaatcctgcagtaaaagaggctattattccaaaaaagggtgaatacaaccaactattactaagtatttcatctttggaccagaagcaagcaagaggtggaataccgcaaagagaaagtgtaccacataaaaaagtagttcttggaattggcacgtattttcttgaaccacccat

SEQ ID NO: 463011 - DNA, 519 bp, Sorghum bicolor
  unsure (1)..(519): unsure at all n locations
gtacagtttttcatcaaatcgcgaattagatcgtttgttcttacctcaacaagagaagcacgagccccctcttttacttcttgttcccaattcactactaagcaagttcgaacgaattgactattcgtgtgataaattctttgagttaacttgctattttcatgagaaataaaattgacaagtcgaagttggagattatcctcttcttgcaggagatcctgcgggaaaagtgttgctaaatttctcccttcgtccatttcatatgagactgcaggtcgaaccgaaacaaaatacttttccttgcttttgagaatttttttccgttgaacataaacccaatttttccttttttttgattccttagaatcttttttttctctttctgggggtatcaaactgccacctaatatcttatccgcctcttcaggaaaatgaatatctccggaaaagattttgaggtctgtatggcttttttttctcttcactcngaccaatccacctagtcgacttcttgtattt

SEQ ID NO: 463012 - DNA, 329 bp, Sorghum bicolor
  unsure (1)..(329): unsure at all n locations
gtaaacatgaaaaagtaggaacttagcgggtccttactcccctttatctgattagagcggaaagggcccgcggaattcttattgttataacgcggttttattccataatctagaaattggttacctatttctatttgtaaaaataacaaagagaaaacctttgctctgatggttggaatccctctatttattctttgtgtttgttaatgatgttagtgagtgaagcaatccatcggtcgatttaaagcccccgcctttcgcccataaaatggattcactcttatgaagcaacaagaaagaggggagggggtccagnnttttattncatg

SEQ ID NO: 463013 - DNA, 572 bp, Sorghum bicolor
atggtacagttgttcatcatatcatgaagtgcgagccatagggaaggagtgagatgactttcacaaatttatcatagacttcgtctatcgcttgagagaagcaacaaagagtaataacttaaaaagaaaaacagatacgaatcgacagatttacctgatgaaaattgacatcagaggactctgatgaggattcctcaaactcttcataaagaggatccagaaagtctctggttagtcgagaccctccatttcctaatttcctctcttcttttccgctcaattctagtttattagattcttgtttaaaagaatcaaagaagatgaatagaactaagaacacataaaaaagagcatagagaaccattaccaaacgttcctcctaagaatcatattgggtatctgtccccttccttttaaccctaggatcaaaatctagaatcctcccttttcctagtgttcggaaaccgaaaaccctgaccctggaggagttagggttggagggtacccctcccctccctccccggcccgcccgccccccccccccctcccccccgctccccctcccccccccc

SEQ ID NO: 463014 - DNA, 548 bp, Sorghum bicolor
gtacagtttttcatcacataatctaaagatcgatgaagttacacgcgggcgctgctgtaaaaagattgatattagcaagacatcaaaagaaagatggtctgaatccattaagaacactcaaataccaaaatgaacagatccggctcaatttcactaaggctaagagcagccccaatcacaatggcaaaattgtgattgttttggcaatttttatttaaagaagtaaaataatcttgtatgagagtacatgcaagaggggcaaccctatcatttgaacgaagtgtagacagaaatacctaatatggagtgacaataaagagacccatctatctacaaattctatttgttcaatagacctttgtcaatggaaatacaatgtaattagatagaaaaaggaaataaaatagggacttttgttggattggcacgatataaatgcagcaaaaaaaaataggactaagaaagaggcaaattgtgtctaaataattaagggggactaaggaccctctcctacctttttattcatttagttcttcaattaactcaaa

SEQ ID NO: 463015 - DNA, 246 bp, Sorghum bicolor
  unsure (1)..(246): unsure at all n locations
cacgatactgactacctgctccatattccttctttatgatatatgtatcatccatttgatatggatatggatttgtttttctttcctaaaagagtttcggtctaacagttttttattatttctcttgttccgagaaataataataataaagaaagagtaaaatacgaaagagaagcgtccattgtctaatggataggacagaggtggggtaaaccttnggnataggntcaaatncctatnggacgc

SEQ ID NO: 463016 - DNA, 465 bp, Sorghum bicolor
tacagtatgttctcacagtggttgtgaatgactgactttttcactcctttcgaccttggttccgtaggagcaagtcagaaaggttgagaaatagaaccatctgatttgattcgttcccaatagccatgagatgatcatcttagggtgatccttttgtcaacggatgctcctattacactcgtagtctctgaaggatgagaacccactatgtagcattgacgatggataattcaagcattgtatacgtcattagtccgattctttgtaggaactacccgtaataacgagcttgcaaaatggatctgtttatcataaagagattcgttgttcctgaccctgcttcaccttaattggtatttgaacaaaaagatcacaataaacttttggtaaaaggtctgtcttgggcggagtggggatagcatttctctcttgcatgtctatggaggtttgcaaaacccaaacacc

SEQ ID NO: 463017 - DNA, 492 bp, Sorghum bicolor
tacagtagttcatcatttcttattcgtctttttctatcttcccattcatctccactatacccctcgtgcttctaatgtccttccattcaaccaaagaattctctataataattcgcaaatctaaatccgctaattgttctctaatagcacctgctcctgttgcaatttcccgatttcgaaatgttgcaaagcctggggtagaaaaaaagggagaaatactgtggttacaggatgaaatttcatcctcgaataaaccccgtaatcgtaagaaagtaggttttttagcgctgggcctagcaaaagagaaatcaccatatactaggccctccaatttcttaaggggtttatctaaaagattcgcaatataactaggaagacctttcaaataccacacatgagtcactggacatgctagtttgatgtatcccatttgatatcttcggatccgagaatcaacaaattctacccccgatttttggcaaaatctttcgg

SEQ ID NO: 463018 - DNA, 361 bp, Sorghum bicolor
  unsure (1)..(361): unsure at all n locations
tcctcacttgagttctctgttgagactggaacttcactactaaaactaaagaagtcttaagtaaactcttttattcctctttttcgaactatgtttcattcatatgatagaaagaatatgggtttaaataaattgtatctttgcagagtgttccccgataaatacttatttcttttatccaattttctccatagatagcaggtttgaattagtatacaaaagcaatgactattcatgattccatccatattggatcaattctcgataccattttgcaatgaaattagaggaatgttatggtaaaacttcgtttaaaacgatgtggtanaaagcaacgtgcgacttgaaggacatgatcgat

SEQ ID NO: 463019 - DNA, 604 bp, Sorghum bicolor
  unsure (1)..(604): unsure at all n locations
agtttttcatcatggtactagcgaaatcggaatgccccccgaaaggggcatcgccgaatttcacttccttgtttagatagtgtatgaataggcccgactaaatccttgtatggcttcctctatttctctataaaaagaaatatgaccaagagtggttcgaatgtatatagaacggatttctttttttctatttcccactactagatagtgggcataaatctcatgataagtcccaaaagattcataattgaacttcaatcggaacttctcttgacccaacgatgcgttgatctagtttccatcggagccacaagggactgtttaaaccgattcgtttctgtctataagctcccagtgcatcataggaactagaaaaatggggttctttatctttcgtatacttataataattgttattattggaggtgatttttttatttggagagtttccggactattatatctatttgcacaaaatcctcgacggtttccaatcggtaaatactaaaagccgataagcatgtcttggggtggcacgccaataggatctccaatagcggagacagggagattctatgaaaaaacttannnaacgggcttccgc

SEQ ID NO: 463020 - DNA, 422 bp, Sorghum bicolor
  unsure (1)..(422): unsure at all n locations
acagtttttcacaaaaggagacatttgagctgagcggaaaatccatacctctcttatccattccatttagagcatatggatcgatttataagaatcgagtgttttgtttttatgttattttgtgatagaatgaaaagaattctatatagaatgggttgggaattatgcctagatcccgtataaatggaaatttcattgataagacctcctcgattgtggccaatattttattgcaaataattccgacaacctccggggaaaaaagggcatttacttattatagagatggtgcgatttgactcttttttttattttagccctacctatatctcattcttacgagaaagagagagggttcgcatagagagaacaaaattagtaaaggaaacccgcgcttggggaaggtgaggngaactaacaat

SEQ ID NO: 463021 - DNA, 294 bp, Sorghum bicolor
  unsure (1)..(294): unsure at all n locations
tgaaaatctcatgtacggctctgtagagggacagtaaggatgacttatctgtcgacttttccactatcaaccccaaaaaacccaactctgccttacgtaaagttgccagagtacgattaacctctggatttgaaatcactgcttatatacctggtattggccataatttacaagaacattctgtagtattagtaagaggaggaagggttaaggatttacccggngtgagatatcgcattattcgaggaaccttanatgctgtcgnagganagaatcggnaacaagggcgttcta

SEQ ID NO: 463022 - DNA, 349 bp, Sorghum bicolor
  unsure (1)..(349): unsure at all n locations
tgctattgagaggaaaaggattaaaccttttataagaactaaaggtttcatcggaatatgaatataaaaaaacttaaggatgccttaagtatatcatttcaaattcagttattaatagaacgaatcacacttttaccactaaactatacccgctacatgtagattatgataccaatgctaccctttgtcaaggggggggattcnagaaggaggctaattccaccttatcgaatcaaaggagaaagttcatggcggtgggcgattggcacttcaatcgcgggtctttactttaggatttagatagcccctctctagtctgtaaaatacatctcttcttaccataccaata

SEQ ID NO: 463023 - DNA, 463 bp, Sorghum bicolor
  unsure (1)..(463): unsure at all n locations
cacatctgcttctagttcgactttctgtaatcgaatacgagctttctcgagtggttcaagggtgcctctacgcaattcttccgaatttcgaatagtacttaagatcctctgttttcgattatctaataaatcttttaatgaaagtagattatcttgctattaagtttacaatttttatgatctcttcccgaaccaaacatgagtggggggattcatttggctctcccgctccttttttttcttttttgttatgtattatggctatttccatatcttttttttatgtaatgagcctatcctctatcctctcttttctgtttgtatttctatatacccaaacttatataagactagatgaatattaagaggactcttccaactagataaaaatctatcatggncagcaaagttggttctttctttgggcccgctctggtaggtaataattncaatttgcattaag

SEQ ID NO: 463024 - DNA, 402 bp, Sorghum bicolor
attcatagcacaagactttactactcaagctgctttatatactcatcaccaatacattgcagggttcatcatgacaggggcttttgctcatggagctatttttttcattagggattacaatccggaacagaatgaagataatgtattggcaagaatgttagaccataaggaagctatcatatctcatttaagttgggctagcctcttcctaggattccataccttgggcctttatgttcataacgacgttatgcttgcttttggtactccagaaaagcaaatcttgatcgaacctatatttgcccaatggatacaatctgctcatggtaagacgacatatgggttcgatatactcttatcttcaacgaatggccccgctttcaatgcaggtcgaaacatatg

SEQ ID NO: 463025 - DNA, 473 bp, Sorghum bicolor
gcatagttagaattaggtaagataaaattgattggaaagcccaaaatcagaccaaagcaattacgtctgctagaataacaaaaaagcgcttccgaattgatctcatcctttatataatataatttttctttgttcggtaataacttaatattggaataaatcactcattatagcaattaataaatggaaagaatttggcattagttcatgaggaattctgtatgaatagggataaaggaaggaaagaataaataaggatccttttttgtattgtattccgtatcttttgtcctattattctttccccgggaggggtatacttaaaaaaaagaataaagggttaattcggtcttgatagccatttccttaacaagtgaatgggaacatactctagaccggaatctgaagaaagtactggttgatcattttcaccaatttcaagtccttattatgattccttttatgaggaaaaa

SEQ ID NO: 463026 - DNA, 507 bp, Sorghum bicolor
tacagtagttcatcacctctgagtcttcctctgagtcttcttctaaagtcccatattccttctctgagccatcttcagagctcccatattcttcttctgagtcttcctctaggatttcatattcgccctctccctctcgggtcctatatttgttctctaggctcccatattcttcctctgagtctttctctagagtcctatattcgtcctctaggatcccatactcatcttctagggtttcatattcgtcctctagagtcctatattcgtcttctaggatttcatattcgccctctccctctcgggtcctatatttgttctctgggctctcatattcgtcttctgagtcttcctctcgagtcctatactcttcctctcgggtccgatattcttcctctagggtcctatatctaaatttaacaattcctgaaccccttttatcttttctgtatcggggatcgcccacacaagcaaaaatagtatttctacggaaaacacccataaagg

SEQ ID NO: 463027 - DNA, 562 bp, Sorghum bicolor
  unsure (1)..(562): unsure at all n locations
tgaaatcactgcttatatacctggtattggccataatttacaagagcgttctgtagtattagtaagaggaggaagggttaaggatttacccggtgtgagatatcgcattattcgaggaaccttagatgctgtcgcagtaaagaatcgtcaacaagggcgttctagtgcgttgtagattcttatttttactgggtgatttgatgatgccatgtgaatcgctagaaacatgtgaagtgtatggctaacccaataacgaaagtttcgtaaggggactggagcaggctaccatgagacaaaagatcttctttctaaagagattcgattcggaactcttatatgtccaaggtcaatatggaaattctttcagaggttttcccttactttgtccgtgtcaacaaacaattcgaaatacctcgactttttcagaacaggtccgagtcaaataagaatgattncgaagcacttcttttttcattacactatttnnggaaacctaaggactcgatcggatggatatgggaaataccggattcccggccctagcgggaacagggaggaaacg

SEQ ID NO: 463028 - DNA, 122 bp, Sorghum bicolor
aaggaaatgtaatgcaagtcataatcgaatttctatctatgggcgtgatagacagaaattcgaatcattttctcgagccgtatgaggagaaaacctcctatacgtttctacggggggggttg

SEQ ID NO: 463029 - DNA, 249 bp, Sorghum bicolor
  unsure (1)..(249): unsure at all n locations
tcatcactctttttttttttacttactttagttctttagttttctggaaaataaataggggggtgcttcttttctttcatattggatgtcaaatagatcctgtaagaattcccacttcatagatacggggtataaagtttatcaaaaaagttccaatttcaaaacacatattcaaaacacatatgagnaatgattttttttttcagggggggggggngcctnatacacacaaatncttcataaaaataa

SEQ ID NO: 463030 - DNA, 339 bp, Sorghum bicolor
  unsure (1)..(339): unsure at all n locations
ttttgtttgaagtatattactctcctctacattatctaaatttacattatataaatcgatccactttaaataaaatagaaaaaatcaaaagaaaaaaagaaagagtaaataataaaacaggatattctgtttcataattctgaaatagagttcttttttttagtattactcctcattaggatgtatatattaatcatccgattttcattatgttctaatctaattagtagtaagtattttcttttttatttaatagtctctgactatcattaaataaagggtagagctattcttttttctagagaatctananaaagggagacaaaangaancgaaaga

SEQ ID NO: 463031 - DNA, 375 bp, Sorghum bicolor
  unsure (1)..(375): unsure at all n locations
gtacagttgttcatcaatgagatgatcatcttagggtgatccttttgtcaacggatgctcctattacactcgtagtctctgaaggatgagaacccactatgtagcatttacatcgataattcaagcattgtatacgtcattagtccgattctttgtaggaactacccgtaataacgagcttgcaaaatggatctgtttatcataaagagattcgttgttcctgaccctgcttcaccttaattgttatttgaacaaaaagatcacaataaacttttggtaaaagttctgtcttggtcggagtggggatagcatttctcttctgcatgtctatggagttttgcanaacccaaacacctnanatagaggtagnaattt

SEQ ID NO: 463032 - DNA, 429 bp, Sorghum bicolor
gtacagctagttcatcattatgcttgcttttggtactccagaaaagcaaatcttgatcgaacctatatttgcccaatggatacaatctgctcatggtaagacgacatatgggttcgatatactcttatcttcaacgaatggccccgctttcaatgcaggtcgaaacatatggttaccgggatggttgaatgctgttaatgagaatagtaattcgcttttcttaacaataggacctggggatttcttggttcatcatgctattgctctaggtttgcatacaactacattgattttagtaaagggtgctttagatgcacgcggttccaaattaatgccggataaaaaggatttcgggtatagttttccttgcgatggcccagggcgcgggcggtacttgtgatatttcttggttgggacgcggtttatttg

SEQ ID NO: 463033 - DNA, 368 bp, Sorghum bicolor
  unsure (1)..(368): unsure at all n locations
gaataacaaaagaaagaaattttttttgtttagtaaaattaaggtctttgcttttacttatagcattctttcttttacctaaaagaaagaactcaaaataaaaaataagaaaagtacgatttcgaatccattctatccaacgaacagttcttaccttaaccttaccgaaatggatcattctagatatttaaagaatcacagatcgagatcgttttcgcttaaccaaagaaaagaaggacgcttcttttttactaataatacaagaaaacaaataatacaacaaaaatctatctctatcataaagggataggtgtcattttctatacagnggtttacctaattaaattttttttttaataaattngaaa

SEQ ID NO: 463034 - DNA, 369 bp, Sorghum bicolor
  unsure (1)..(369): unsure at all n locations
acccatacttcgatcgattatagattgaatcctttttataagcaataccgctggattgggggtatgtttatgttatgttattccgttattggtatgtttatgttatatagtaaacggatgaaagggatatcctctggcattagagaatattcatcttgacaagaaattatctatatgttaagatatctctgtcaagggctaggggggggttcnntanagcaactcntttacacgtgcgccaatgcttttcaagggaacttattatgcaatgaacataattgaccttggtgcaaaatcaatgggttacttcatggattcgaaagaatagaagaacaggagcctgacagtgacaaacagccgggcgaggcc

SEQ ID NO: 463035 - DNA, 257 bp, Sorghum bicolor
  unsure (1)..(257): unsure at all n locations
gaaaatnaatttatttttttttataaaaaaaaagaaattgattttattanganatgntattttttnnattnattanntttgaggatnagtngtggtnttntagaatntannaaaagtntggangaatttgttggttnatnnaaatgtgtaaaagatnataggggggggtgaaaagnngagtantntannattgagttagnaannnagataaaagaggatntnttagatangatnaaaatntaaaaatngatgaaatt

SEQ ID NO: 463036 - DNA, 361 bp, Sorghum bicolor
  unsure (1)..(361): unsure at all n locations
ggtacagctgttcatcacctgcattcgcgagtgtacactacaggatctatatagacactgctctagtcttgataaaagacataggctgttcaccataccaaaggcgtatgaaccagatgaaggcattgagataatgaggtactttacggataggactacgaggatcattattcgtgaggacgaacatgtgccagactgttgtctggaatcggataattattgtgcagatgtactaagagatataagggcaggacaatcccctacctttcttacttttctttttgtgtcagatttgaacaaagaaattgggaaagatgtttgcttnctccacgtatcatgaagggcgagccatagggaagga

SEQ ID NO: 463037 - DNA, 452 bp, Sorghum bicolor
  unsure (1)..(452): unsure at all n locations
gtacagctgntcatcaaatcttactttacaaaaaaaatttctttcttttgttattcgagtcgaagaagtgtgagaattttataactacccaaaaacgaccaatcttttcattggcactagcttatttgtttaatagcttatttgtttaatagttaattgtttttgttacagaaaaatctattaattcattaaattaattccgctttttttgaggttgatagtttatttgttgggaaagggtcgatccttctcatttcaggattgatcatcttgagttctctgttgagaatggaaattcaataataaaaataaagaagtcttaagtaaactcttttattcctctttttcgaactatgtttcattcatatgatagaaagaatatgggtttaaataaattgtatctttgcagagtgttccccgataaatacttatttcttttatccaattttctc

SEQ ID NO: 463038 - DNA, 310 bp, Sorghum bicolor
  unsure (1)..(310): unsure at all n locations
acttcgatttacttttttttttatttttattcgttttttgaaccccaacaaaagttgattcgaagttacttcaattatccttttcttttaagttcttcttgtaaagttccatgcttgctgtttggtcaagaaagttagacctaatccaacaaacaagacaaggattgattacgaatcttgattcttcaaagaatgtattccgtttctttcataacggattatccactattcgattttctatttattagatattattttatgctaaccaattaaattcctttaactaaaaagggatagattntggatatac

SEQ ID NO: 463039 - DNA, 220 bp, Sorghum bicolor
  unsure (1)..(220): unsure at all n locations
aactgactaaaactaaaagatcaaggaaggaaaaaggtattaggatattttttggtgtatgcatataagttgttaagcagtagttatttttttttccttagagttagtaaaaatggatttttctaataaaaaaatcctaatacctagtaatccgtaatcgttcttgaattccaagatttttcttcntctattttactttggggggggggggaattcnttg

SEQ ID NO: 463040 - DNA, 488 bp, Sorghum bicolor
  unsure (1)..(488): unsure at all n locations
tcatcaattgttcatatttgatttctatagaagagtgaaatgctttatcgaaggaaatgaggagggagagaaagggtatgttgctactcttttgaaagaaaaaagaataggagttcccgaagtaatgtctaaacccaaggatttcacaaatcaaagataaaggattccggaacaagtaaacacgattttcaaccgtctcaacaatagaattgggggaggataaggaataaaagtcaatttgttcgagatgagataaagaaaagagtttagagacgactcaaaaaatttcgaagggtttttcttttgaagtttgtcagtcaaaattagccaacttgagtcatgagtataaatgaaatttgttttttattttctttaaggaaattaatgcaagtcataatcgaatttctatctatttgccttatagacagaaattcnaaccattttctccagccctatgaggggaaaacctcctatacgcttctaggggg

SEQ ID NO: 463041 - DNA, 304 bp, Sorghum bicolor
catcataccagagcaacgagtattgcttcgtttatctgagaaagaaatcgctgtattggggagagggggcttaaaacaggaaatcttattatcacttctccttgccgtaacccggttatgaaaaaattagaacggaagggcatcattcaacatcagagtgatagcgcaaactgttcttattatctcgtcaccgaaaaatactcccatttgggggggattctggaacagcaggagtagacgttttaatcgttagcttactgtgtgcttctccaaccatcggcgcgcaccagtttcgggtttaaat

SEQ ID NO: 463042 - DNA, 470 bp, Sorghum bicolor
  unsure (1)..(470): unsure at all n locations
tcatcacattttatttctatctttccatacataaccaaagaatggaaaagattcttcaagagtctcgggtcccagaagcgcgtgataaatgccaccgaagcctaagactgcggaggaaattaagtgaagtactccggatacaaagtaaggaaaagtatctagaacttctccccccggccctactccccaacctagagtagctaagtgcggaagtaaaatcaacccttgttcatacatggngcttttctggtacgaaatgggccacttcaaataggttcattgctccggcccagaatacgattaatccggcatgggctacatgagctccaagtagtttaccggacaaattgataagtctggcattcccagcccaccaagcaaagccggtggtttcttggtcacgaccagctaaaacgaaagttccattaaagagcgtttccacgtggtagaaccttctcaagggatataag

SEQ ID NO: 463043 - DNA, 499 bp, Sorghum bicolor
tcatcaatcagagtcctctgatgtcaattttcatcaggtaaatctgtcgattcgtatctgtttttctttttaagttattactctttgttgcttctctcaagcgatagacgaagtctatgataaatttgtgaaagtcatctcactccttccctatggctcgcacttcatgatacgtggaggaagaaaacatctttcccaatttctttgggcggggctgaacaaaaaagaaaaggaagaaagggaggggattgtactgcctttatatctcttagtatatattgtaggaataattaaacgattccagacaacagtctggcacatttacgtccttacaaataatgatccttgtagtcataaccgtagaatagatcctaatcgaaatgcatacatttggttcatacgctattggtactggaagaagagatgtattttacagactagagaggggctatctaaatcctaaaggaaagacccgcgattgaagtacccaatcgccacc

SEQ ID NO: 463044 - DNA, 477 bp, Sorghum bicolor
  unsure (1)..(477): unsure at all n locations
ggtacagttgnttcatcaaattgtaaccctaccagggaatataagctactaaaacgattattcctaaagcaagttcccggacaactgtagctgctccctccgctaaaatttgcccttttttaatggatttaccccgcggaacccgaggtttttggtgcatacaagtatttttgttagagcgccgatgggcaactaaaggaatacttatggtcttaccactagttgataaaaggatcttgtgactatcactagaaatgatctttccctcgcgttcggctataacggaaaccctcgaatctagagctgtttgtcgttccaatccagttccaacaatgcacttctcggaccgagaaagtggaactgcttggcgctgcatattagaactcattaaagcccgattcgcatcattatgctcaataaaaggaatgagagaacctccaatagaaaaatattggaaaggaaaaatacttntaacat

SEQ ID NO: 463045 - DNA, 650 bp, Sorghum bicolor
gtacatttgttcatcaattgggtatctgtccccttccttttaaccctaggatcaaaatctagaatcctcccttttcctagtgttcggaaacggaaaaccctgaacctggaggagttaggtatgtaggatatgctttttattttttgttgggcaggcagtagtataatttttatactctgcagtataaattcgactcccaacttttttttagaataaaatggtggataaaactccaacatagtttgttccaaatccactagaatccttgtagaatagtcaagtaccccatttccaaggggtacctgttgaaaatcgtttcaacaaatccgtccaaaactttttaagaaaaattaaaaagttttgaactcgaaagtttttccaagagatgcctgctaaaaattgtttgaatctctcaccaaaacagataagaagtatatcactgaaaattactatccagccatatgggtatatgaagagcgcaaattcctttataccccacccaattagaattaggggaaataaaacataaatgtagaaagtgctcatcataagatcagcccatagaagaaaaaagtccctaattctgcagaacattctgagcacgtgaaaagtgaatagcccaaagataaaaaaaaagtttatcatttttt

SEQ ID NO: 463046 - DNA, 639 bp, Sorghum bicolor
  unsure (1)..(639): unsure at all n locations
attacataagcaaataccaatgtactaaaaaaagaaaaaagttctatctgaannactcattttcttttttaggattaaacaaaagggttcgcaaataaaagcgctagtgccacaaccagtccataaattgttaaagcttccataaaagctagactaagcaataaagtacctcttattttaaccttctgctttctggggtggggggcaataccttctacagcttgtcctgcaacaataccttgaccaactccgggcccaatagaagcaagccctacggccaatccagcagcaataacggaagcagcagcaattagtggattcatggtgagttcctcgtgtcaaaaaaaaaagaaatggttaaggatacaatcaaccaagaaattattacttccaacttctaagctctatcgggtagaagtaactaataagtacaaataaatgataatcgaaatcgttcgaattacttcgagatctcgtttttagtttctaatcattagagggttgtggaaatccatatgattctcattattctatttctctttcttttcaacccatcactcttttattccatccttttttttactctgaaaaaccctatttgaatcaaactaatcaaatccaataggaataaaatcaaga

SEQ ID NO: 463047 - DNA, 652 bp, Sorghum bicolor
  unsure (1)..(652): unsure at all n locations
gcaagttgttcatcaataaaaaagnaaaggatatgggctcgcgtgagtagaaaacaaaagatatctatgggagttgtatcatcagctatgggttcgaatctaagagaaattttagataatgtttcctaccccgaaattttcttgtctttcccgaatgctaaggagaagaagaggattgagtcaaaagaaaaagctattttggagttttatcaacaattggcgtgggtaggtggggacctggtattttcggagtccttatgcgaggaattacaaaagaaattttttcaacaaaaatgtgaattaggaagagttggtcgacgaaatatgaatcggagactgaatcttgatatccctcagaacaatacattcttgttaccacgagatgtattggccgctacggatcatttgattggaatgaaatttggaacgggtatacttgacgatgacgatatgaatcacttgaaaaataaacgtattcgttcggttgcagatctgttacaagatcaattcggactggctcttggccgtttacaacatgcgggtcaaaaaactatccgtagagtattcatacgtcaatcgaaaccgactccacaaactttggtaactccaacttcaacttcgattttattaatcactacttatgaaacctttt

SEQ ID NO: 463048 - DNA, 218 bp, Sorghum bicolor
ctcatgcatatcttagccgagatcctcatccctaaaggtacttgacaatagtattattggagtcgatacacaactcacaaaaaatacaagaagtcgactaggtggattggtccgagtgaagagaaaaaaaagccatacagaactcaaaatcttttccggagatattcattttcctgaagaggcggataagatattaggtggcagtttgatacccccag

SEQ ID NO: 463049 - DNA, 73 bp, Sorghum bicolor
tctcacgaattttcttgtctttcccgatgctaaggagaagaagaggattgagtcaaaagaaaaggctattttg

SEQ ID NO: 463050 - DNA, 604 bp, Sorghum bicolor
gcaagttgttcatcaggtacaaaattgacaatctcacgaggatgaaatatcagtaactttctatttactggtggatcccatcttttacggaatcaattccttttttgaataaaaattttgggagctcagcatgtctggaagcacgggagaacgttcttttgctgatattattaccagtattcgatactgggttattcatagcattactataccttccctattcattgcgggttggttatttgtcagtacgggtttagcttatgacgtgtttggaagtcctcgaccaaacgagtatttcacggaaagccgacaaggaattccattaataaccgaccgttttgattctttagaacaactagatgaatttagtagatccttttaggaggcccccaatgaccatagatcgaacctatcctatttttacagtgcgatggctggctgttcacggattagctgtacccacggtttttttcttgggatcaatatcagcaatgcagttcatccaacgataaaccaaattccaactatagaactatgacacaatcaaacccgaatgaacaaaatgttgaattgaatcgtaccagtctatactggggtttattac

SEQ ID NO: 463051 - DNA, 577 bp, Sorghum bicolor
tcatcagatctattttattgacaggatttatcactactttagctactttagcggcttggccggttactcggaattcgcaattattctatttcctgatgctagcaatgtatagcggtcaaataggattattttcttcacgagaccttttacttttttttatcatgtgggagttagaattaattcctgtttacttacttttatccatgtgggggggaaagaggcgtctgtattcagctaccaagtttattttgtatactgcgggtggttccatttttttcttaattggagttctgggtatgggattatatggttccaatgaacccggattagatttagaaagattgattaatcaatcataccctacaacattagaaatactactgtattttggcttccttattgcttatgctgtcaaattgccgattatacctttacatacgtggttaccagatacccatggggaagcgcattacagtacatgtatgcttttagccggaattctattaaagatgggagcatacggattgatttcgggcaacatggaattgttaccgcatgctcattatctatttttccc

SEQ ID NO: 463052 - DNA, 533 bp, Sorghum bicolor
tcatcattatattttaggtattatctgatttgcaaatatccatttctaaatcaatggaatgtgaggattagagataaattcatatattctgtctactctactttcaaattgattgaaaaaaaaatttaatgaggtaaaacactgtatagaaaatgacacctatccctttatgatagagatagatttttgttgtattatttgttttctgggggggttagtaaaaaagaagcgtccttcttttctttggttaagcgaaaacgatctcgatctgtgattctttaaatatctagaatgatccatttcggtaaggttaaggtaagaactgttcgttggatagaatggattcgaaatcgtacttttcttattttttattttgagttctttcttttaggtaaaagaaagaatgctataagtaaaagcaaagaccttaattttactttacaaaaaaaatttctttcttttgttattcgagtcgaagaagtatgagaattttataactacccaaaaacgaccaatcttttcattggcatagc

SEQ ID NO: 463053 - DNA, 287 bp, Sorghum bicolor
tctctctctttgcattatagacagaaattcgaatcattttctcgagccgtatgaggagaaaacctcctatacgtttctaggggggggttgtttatctacatctatcccaataagctatctatcgaatcgttgcaattgatgttcgatctcgaagagaaggaagagatcttcgaaaagtaggtttttatgatccgataaagaatcaaacttgtttaaatgttccagctattctctatttccttgaaaagggtgctcaacctacaagaaactgttatgatattttaagg

SEQ ID NO: 463054 - DNA, 499 bp, Sorghum bicolor
cacaatccacctagtcgacttcttgtattttttgtgagttgtgtatcgactccaggaatggtattgtcaagtacctttagggatgaggatctcggcaagatatgcagttcttgaagaatgaaaaaaaaccgatctacttctttttggtattttagactaaattcttttgttcctcgatgctcaataaaaccctctttttttaagatggagtgttcctccgggctcccatattcgtcttctgagtcttcctctgagtcttcctctgagtcttcttctaaagtcccatattccttctctgagccatcttcagagctcccatattcttcttctgagtcttcctctaggatttcatattcgccctctccctctcgggtcctatatttgttctctaggctcccatattcttcctctgagtctttctctagagtcctatattcgtcctctaggatcccatacttatcttctagggtttcatattcctcctctagagtcctatatt

SEQ ID NO: 463055 - DNA, 331 bp, Sorghum bicolor
  unsure (1)..(331): unsure at all n locations
taatccttttctccttagaccatgtattttaaattatttctccttaatcctattctcttctagatcatttcccctctcccttggtcctttttttctctggctctatttctcttctatcttccttttttctatgggggcggtnntccatttcttcttaaatcctatatctaaatttaacattctnacccttttatttttcttatctnatctcaaaataacaaaaaanttttctcctaaacacccataaannttttcattnaatacccaacannaattccttctttttttttcttataattttaatnaacccaaacctattttcctttttccc

SEQ ID NO: 463056 - DNA, 625 bp, Sorghum bicolor
tcatcagacataggattgactatggattcgagccatagcacatggtttcataaaatcgtggcggtgttcccgatctaaatcgagtgggtttccatgaagaagatcttgttcagcatgttctattcgatactggtaggagaagaacccgactcggtattcttaaaaaaagaggggaagcagaaccaagtcaagatgatttggatcggcggggggtcttgcgccaaagatcttaccatttctgaaggaactggggctacatttcttttcaatttccattcaagagtttctatctgtttccacgccctttttttgagacctcgaaacatgaaatggacaaattccttctcttaggaacacatacaagaaaaaggataatggtagccctcccattaactaatttaagaatttcatagtaatagaaatccatgtcctaccgagacagaatttcgaacttgctatcctcttgcctaataggcaaagattgacctctgtagaaagactgattcattcggatcgatatgaggacccaactccgttgcattgccagaatccatgttccatatttgaagcgggttgacctctgtgcttttctcatgggacaatcctcttcctgctgagccccctt

SEQ ID NO: 463057 - DNA, 596 bp, Sorghum bicolor
caagtagttcatcatttatgtaatgagcctatcctctatcctctcttttctgtttgtatttctatatacccaaacttatataagactagatgaatattaagaggactcttccaactagataaaaatctatcatggtcagcaaagttgtttctttatttgtgtttgctctgttagttaataatttcaatttcattaagaaaaacaaactaaataaatggaaaataaaaattgatagaattccttttattttttcttcaaatccaaaaaatttctctttttttttatacataggtcgtcgatttggcattggaaaaaggactgcgtgcccttctagtaaatagttcaaactattttatcgatatgagtgttctatatcagataaattctacactagctatttcccgtttaaagcatttcgagactaatactaatactaatgtagttgtagaaagagtacccctttttgcccggacttcaagcagtttagctttaaccgtgttaatggtctcacattattggtctatagagaatcaaatttaatttaccaatggatctcgaaatgctatggttcttccatatgatttctgaaggtattc

SEQ ID NO: 463058 - DNA, 579 bp, Sorghum bicolor
acgctcaattaaagaaaagagttgatactacaattcgactactcaatcaattggtagtatccctagagtccactcctcccccatactactagcgaaagagaaaatgtaaagactaccattaaagcagcccaagcgagacttactatatccatgtaaattatgtctcctatttctatgaaagaattcttctactattgatcaataatcatagtggaatcaagggtacagagtcaaaaggccattctattctgccctaagactatggatgaacccgttaaaggaatttactcctaacaaattcttatatgatttctggtagaattggagagcattaagtagaaatatgatacatcgctctttccctaaaaaagagtaggggatgctctgaatagaagacgcgggaatagagagattttttctttcgtttgttaccttttttataagcaaaggacgtaagaatataccataaaattaggataaataaatatttattggatacctaacttacccatgtttatttttatttttgacctaaaccctactggtgccccgctttctatctttttatgaaagagtaag

SEQ ID NO: 463059 - DNA, 646 bp, Sorghum bicolor
  unsure (1)..(646): unsure at all n locations
gcagttgttcatcatctattccacttctaccctttaaattcaagnggtattctgaaagaggtatttcttttattttcacaatagctttcttttgaatccaatttcaagttcgattagaaggatagaaaggcgatgagaatgggaaaagataaattcaacattttattttaatgagttcccctttttagttccccttttttgcaattttcttattttttaaactaaaaaatacaatagtcaatattccttataatagatatacttaattatatcataagaatcttaagatatatttcgaatagatagaaatagtaaatttgaattgagacacatattctatgacagatcttaacttaccctctattttcgtacctttagtaggcttagtatttccggcaattgcaatgacttccttatttctttatgtgcagaaaaataagattgtctagaaacgacggggccaaattttctcaatgtatttccaggatcataatacagatatttttttgtgtaagtagtataatatgataggggatgtagctctttctacacacaaatgaaaacgtctatggatgcagatataagctacgagcataaatgcctgcatatgcgtagccgactatagcgagttttttttattttaagt

SEQ ID NO: 463060 - DNA, 596 bp, Sorghum bicolor
gcaagtagttcatcactagattgatccgtagggattgatgaagagtgagctgataatggaatttttcttctataaataggaaacttaagattcaaatgctccggaatggaaatgagggaatgtccacaatacccggatttagtcagatccaattcgagggattttgtagattcattaatcaaggattggcggaagaacttgagaagtttcccacaattaaagatccagatcacgaaattgcatttcaattatttgcgaaaggatatcaattgctagaaccctcgataaaagaaaggaatgctgtgtatgaatcactcacctattcttccgaattatatgtatccgcgagattaatttttggtttcgatgtgcaaaagcaaaccatttctattggaaacattcctataatgaattccttaggaacctttataataaatggaatataccgaattgtgatcaatcaaatattgctaagtcctggtatttactaccgctcggaattagaccataagggaatttctatatacaccggtactataatatcagattggggaggaaggtccggattagcaattgataaaaaagaaaggatatgg

SEQ ID NO: 463061 - DNA, 552 bp, Sorghum bicolor
tcatcaatacgattcatataagatccatctgtctagagatcgtcatatacatctagaaagccgtatgctttggaagaagcttgtacagtttgggaaggggttttttgataaaaaagaagaatctacttcaaccgatatgcccttaggcacggccatacataacatagaaatcacacgtggaaggggtgggcaattagctagagcagcaggtgctgtagcgaaactgattgcaaaagagggtaaattggccactttaagattaccatctggggaggtccgtttggtatcccaaaactgcttagcaacagtcggacaagtgggtaatgttggggtgaaccaaaaaagtttgggtagagccggatctaagtgttggttaggtaaacgccccgtagtaagaggggtagttatgaaccctgtggaccacccccatgggggtggtgaagggaaagcccccattggtagaaaaaaacccacaaccccttggggttatcctgcgcttggaagaagaactaggaaaaggaaaaaatatagtgatagttttattcttcgtcg

SEQ ID NO: 463062 - DNA, 300 bp, Sorghum bicolor
  unsure (1)..(300): unsure at all n locations
aggtcaagagattcgttgcgagatcacgaatcatattacaggtctgatggtatatctcagtatagaagatggaaatagcgatatttttttgtttataaactcccctggcgggtggctaatctcaggaatggcgatttttgatacgatgcaaacggtgacacctgatatatatacaatatgcctcggaatagccgngtccatggcctccttcattctgcttggaggagaacccacccagcgtatagcattccctcacgctaggattatgcttcaccaacctgctagtgcttaatatcgggc

SEQ ID NO: 463063 - DNA, 620 bp, Sorghum bicolor
  unsure (1)..(620): unsure at all n locations
aagaagacccacattcctcctaaaaggacttgttgcttttattgttctctgtttnccttggatcctcttcttttgcatgagatagaaataaggaattccagaaatcgaggcttttttctaacttgatggtaagaaatcccaggatctagaaattcatttcgtacaattgaaccttttcaaactgtttctttttgaggaggggggaaacttgtgccaaaataacagatgcgaagaagaacaaaaggccttggacgcgcaatggatcctgaagcactatttctgcatccccctgaccaaaccctcctacattaggattgcttgttaatggttgatcaagcttgattgattccccctttgaaacaagaagttctggcccgggaggtataatatcaatcacttggcgtccatccgacgcatccactatggatatttcatatccccccttttctttacgtagtattttttttactatacctgttgacgtagcattatagaccgtattgttactcttgctaccatcaggatagaatctgnccccttccttcgtttncccctacatatatgggatattttaaaaaatgaacgtctttttttgggggggattcggggaaagaaatgga

SEQ ID NO: 463064 - DNA, 616 bp, Sorghum bicolor
tcatcacgctttcttacatcaatgtggattacctctagagatagcaataaagctttgggagctgtgtgtaattcgcgatttaatcacgaaacgtgctacttctaatgtcaggattgctaaaaggaaaatttgggaaaaggaacccattgtatgggaaatacttcaagaagttatgcggggacatcctgtactgttgaacagagcacggggggggcatagattaggcatacaggccttccaacccactttagtagagggacgtactatttgtttacatccattagtgtgtaagggtttcaatgcggactttgatggggatcaaatggctgttcacctacctttatccttggaagctcaggcggaagcccgtttacttatgttttctcatatgaatctcctgtctcccgctattggagatcctatttgcgtgccaacccaagacatgcttatcggactttatgtattaacgattggaaaccgtcgaggtatttgtgcaaatagatataatagttgcggaaactctccaaataaaaaaatcaactacaataattacaattattattagtatacgaaagataaagaaccccatttttctaaatcctatgatgcactggga

SEQ ID NO: 463065 - DNA, 158 bp, Sorghum bicolor
ggaaagagaatgatagaagatgtatggtttgaatattttctattggaggaatttaatatttttgattgaacataatgatagataatttttctatattgatttataagatgctatgtgaagcaacgccatttttttgagacgtgaagagaatagatgga

SEQ ID NO: 463066 - DNA, 563 bp, Sorghum bicolor
tcgctgcaagtagttcatcaatttttcttaattttctcaagattttaaatctcgccataaaaaaacttcgagatcaagatatatagaaaagaaaatctctacatatctctatatatgtatatattatgtacattaatatatacatataatatgtacattatgcagtagacccataatggtaaatgaaagtggctaattattgaataaaaagcccttttaactcagtggtagagtaatgccatggtaaggcataagtcatcggttcaaatccgataaagggcttttcacttagtggtagaataatgccttggtaagacagaagttatcggttcgaatccgataaagtacttttctactaaattcattcatttcttttttgaaaatgtctccattttttttttttgcaattttatgacttagtttaatgcgagatgcccacatttttggtctgaacactaaacgaagcacagagttaaaattgcaaaaaaaaatgaaattggactctttttcctgttatagcaatcaaatcaatacctggactgaactaatttagaatccttttt

SEQ ID NO: 463067 - DNA, 599 bp, Sorghum bicolor
tcatcatccataacctctttatttttttttttcacaataactcgggatgtaatcccatggagaggaaaaaggggtatcctgtaaattcaaggggaggacttgcattctgataatactgaatcaattcaatattatgaatattggatctatcaaatcaattcatggttgatagtggaataatataacataggaagatctcttatccatactaagaccaaaatgggttttttgattggattcgaaaccccctctattctatttttcattcttttctacttttgtttttctatatgtataatccaaaatctttcttatcttatccaatttcccttcctttttcttatagttatacatacaattatgtatgtattatatgaccaactttctatgggtcacatagacatcccaataagcagtagaagtagaaatgagatggagaaaagaggatcttaaataaaaaggatcccatattttaatttaggaaaaagagcgtttgcttggtttttattttattaggttactatcaatatacgctttttggggtctaaagatgagagccaatccataaaagaaggagtcggcaaatggagtgagaatga

SEQ ID NO: 463068 - DNA, 501 bp, Sorghum bicolor
tgcagttgttcatcactctctatcgaagtgggaattcttacaggatctatttgacatccaatatgacagagaagaagtacccccctatttattttccaaaaactaaagaactaaggtatgtccaacaaaaaagagggggagtattctaattctatcgctcatggccagattaaagagtaggacgtttttagtttcagcacaggccttaaaactttcgaccaagatcggtgcgaaaaaaagaaaaaggtttccattctacggatagggactctattctgatattttaggtattatctgatttgcaaatatccatttctaaatcaatggaatgtgacgattagagataaactcatatattctgtctactctactttcaaatggattgacaaaaaaatctaatgaggtaaaacactgtatagaaaatgacacctattcctttatgatagagatagatttttgttgtattattagttctcttggattattagtaaaaaagaagcg

SEQ ID NO: 463069 - DNA, 538 bp, Sorghum bicolor
  unsure (1)..(538): unsure at all n locations
atatcaaaccaaccccaatccttttacctattaacatcctagaagatttcacaaaaccgttatcacttagttttcgacttttcggaaatatattggcggatgaattagtcgttgttgttcttgtttctttagtccccttagtagtccctataccggtcatgtttcttggattatttacaagcggtattcaagctcttatttttgcaacgttagccgcagcctatataggtgaatccatggaaggtcatcattgaattaactagtttttgaaatagtctttttttttagcttagcccaattcatgcatgattccggataatcctcttggttggaaaactaaatagttcgaaaggcgtatgaatatacaacctagagttgtaggagagagaatagactatattatggaagaggtaaaatatatatgcattcaggggggcggaatctggttagatctatatccttaatgcctataagacagncatctttttgtgtggctttctaaggaatggatttagaatcggattcaatagaaaatgag

SEQ ID NO: 463070 - DNA, 597 bp, Sorghum bicolor
  unsure (1)..(597): unsure at all n locations
catcaagacgaaaagaatagaagaagcatctgactctttcatgcatactccacttgggtcnggggnngtatagctcagttggtagagctccgctcttgcaattgggtcgttgcgattacgggttggctgtctaattgtccaggcggtaatgatagtatcttgtacctgaaccggtggctcactttttctaagtaatggtgaagaggggggggggtgccactgaaagactctactgagacaaaaagatgggctgtcaaaaaggtagaggaggtaggatgggcagttggtcagatctagtatggatcgtacatggacgatagttggagtcggcggctctcctaggcttccctcatctgggatccctggggaagaggatcaagttggcccttgcgaatagcttgatgcactatctcccttcaaccctttgagcgaaatgtggcaaaaggaaggaaaatccatggaccgaccccattgtctccaccccgtaggaactacgagatcaccccaaggaccccttcggcgtccaggggtcacggaccgaccatagatccctgtcaataagtggaacacattannccgnccgttcttccgttgggc

SEQ ID NO: 463071 - DNA, 610 bp, Sorghum bicolor
tcatcactattgctaccgcgggtcttatgcaatcgatcggatcatatagatatcccttggacacggcataggtcatcgaaaggatctcggacgactcaccaaagcacgaaagccagttagaaaatggattcctatttgaagagtgcctaaccgcatggataagctcacattaacccgtcaattttggatccaattcgggatttttcttggggggtttcgggaagaaattggaatggaataatatcgattcatacagaggaaaaagttctctattgatgcaaacgctgtacctagaggatagggatagaggaagagggaaaaatcgaaatgaaataaataaagaataaagccaaaaaaataagtcgaagatagaagagcccagattcaaaatgaagaaatggaaactcgaaaaggatccttctgattctcaaagaatgaggggcaaggggattgataccgagaaagatttcttcttattataagacgtgatttgatccgcatatgtttggtaaaagaacaatcttctcctttaatcataaatggaaagtgttcaattagaacatgaaaacgtgactcaattgggcttagttagtcttcgggacggagtgga

SEQ ID NO: 463072 - DNA, 456 bp, Sorghum bicolor
tcatcacaaactttggtaactccaacttcaacttcgattttattaatcactacttatgagacctgggttggcacataccccttagctcaagtttttgatcaaaccaatccattgacacaaacggttcatgggcgaaaagtgagttgtttgggtcctggaggattgacggggagaactgcaagttttcgtagccgagatattcatccgaggggtatgggcgtatttgtccaattgacacgtccgaaggaatcaatgttggacttaccggatcgttagctattcatgcgagaattgatcactggtggggatctatagagagtccgttttatgaaatatctgagaaagcaaaagaaaaaaaagagagacaggtagtttatttatcaccaaatagagatgaatattatatgatagcagcaggaaattctttgtccttgaatcagggtattcaggaagaac

SEQ ID NO: 463073 - DNA, 512 bp, Sorghum bicolor
cataatgaaaaagattctacatatccgaccaaaacgatccagaatatcccaatctgataaatcagtccaaacgggtttactaataggatgccccgatccagtacaaaattgagcttttgataaggatccaacgaggggagttgcagggactgtggtatcgaattttttcattcgagtatctattagaaaagaattctccagcatttgattccttactaacaaagtatttattggtacacttgaaaggtaccccagaaaatcgaagcaagagtttgttaattggtttagacgaatcctttgtggttgagtccaaaaagagaaaaaatattgcgagaaattgacaaggtaagatttccatttcttcttcaaaagaagagtgccttttgatgcaagaattgcctttccttgatatcgaacataatgcataagaggatccataaagaaccatatggttttccgaaaaaaccccgggtacattacaccaaaatgttccatcttcccagaaaagatga

SEQ ID NO: 463074 - DNA, 547 bp, Sorghum bicolor
  unsure (1)..(547): unsure at all n locations
tgtagataggtggataactagattggcaagtattttaaaaataaagtactttatctttattttaggattctacaacgaaatcctttattttctagcaattctactactacgaaacaaaaaagacccttcaaattctttttgaaaaagaaactaagcgtgctattctaaatcgaactgaagtcaaactttctagtgcttataaattattatggctttatccctttcatagaaaggagataaaacgagaaatctttgctatccaatctttttagaatatcataaagtttaagtggcataatttttttctaggactgttttatcaattcatttttattccatttcgacccctgcgaaattcgaactttcgtcgaaatcgtctctattcatatgtatgaaatacatatatgaaatacgtatgtggagttccctagaatttcatgggattcagtaaacagaatatgggttccatgattgctagattgatcccnagggattgatgaagagtgagctggtaatgggaattttcttttattaaaagggaaactaa

SEQ ID NO: 463075 - DNA, 574 bp, Sorghum bicolor
actactattggccaaactacctgagcactgggtccattgtgagtaggatcgctgagccatgcttcataattggaaaaacgggcaccgtggaagtacatgccactcaaccaaagaaagataatggagagttggccgaaatgagcactaaagacttttcgggagatctcctccaaatcaccggtatgactatcgaaatcgtgagcgtggggatgtaggttccagatccaagtggtagtgtcgggacccttagctattgttcttgagaaatgcccgggtctggcccattcctcaaaagatgtttttacaggatccctatccacagcaattttaacttctggttccgacggacgaataatcattaagtcctcctctttccggacaagacatacaaagagacccgccaactgtctttttattgaatcttttaaagatagatattatgattagtccttttctttactatctaccgtccttctatttttttttagttattcactggagcaattatatattggaagcaatccaaggcaagtggtcggatctattatgacataaggattaggtgcctaacgga

SEQ ID NO: 463076 - DNA, 537 bp, Sorghum bicolor
ctacatctactttccttgagtgagcataatatagattttttgattcggttccagaattccaagataactcattagaattattaataagaccgtcctgatatattaggtaggaatatttagattgccgacttttatgtactttattacttctgttccagagcctatccctattgtttatccttatgatatatgaggggggagggaaggtagaagaaagggatataatgaaattcttgatttgatcttccaccctttttatgaaaatggagagtggtcttattcaaattcaaagcgcttcgtaatctttaaccagttctgtgcttcaatataatttcctggagtaagcgctatagcttgtttccaatactcagcagcttgatcaaaccaagcttccgcaatttccgaatcgccctgtagaatggcctgttctcctcggtcggaataggcagttcctttccctagaaccgtacttgagagtttcctacctcatacggctcagaaattggtatcttaaatttccctatattaactgaattc

SEQ ID NO: 463077 - DNA, 630 bp, Sorghum bicolor
gcagttgttcatcatttccgaagttcaatcttttatcagagtgacaatatgaatattacaccatgttccatgaaagcactcaaggggttatatgatatatcgggtgtagaagtatgccaacactcctattggcaaatagggggtttccaaattcatgcccaagtactcatcacttcttggttcgtaattactattttgctaggttcagttatcatagctgtggggaatccacaaaccatcccgaccgatggtcagaatttcttcgaatatgtccttgagtttattcgagacttgagcaaaactcagattggagaagaatatggtccctgggttccctttattggaactatgttcctttttatttttgtttcgaattgctcaggcgctcttttaccttggaaaattatagagttaccccatggggaattagcagcgcccacgaatgatataaatactactgctgctttagctttactaacatcagcggcatatttttatgcgggtcttagcaaaaaaggattgagttatttcgaaaaatatattaaaccaaccccaatccttttacctattaacatcctagaagatttcacaaaacccgtatcacttaattttcaacttttcagaaatata

SEQ ID NO: 463078 - DNA, 155 bp, Sorghum bicolor
tcatcacccaggtctccgcgttccgtcatctggcttatgttcttcatgtagcattcagatcgaatgactctatgaaattacgtcgatacttccacatattatgggtaacgtaggagacatccctattttcacccggggttcttaattaccactgc

SEQ ID NO: 463079 - DNA, 613 bp, Sorghum bicolor
  unsure (1)..(613): unsure at all n locations
gcagtatttcatcacgtggggatacattggatgaatccttaaggaagacatatcacaaaagaaacaaagcctaaagtaagcgctccttgcctttggtttgagcaaaacagattcttgtttcaccgaggaaaagagagaagttctggataaattgacaatgtcaacttgaattgactaattcagttccgcctattccacattaatgggagtacatttatgtttctgcttcacgaatatgatattttttggacatttctaataatagcaagccttattcctattttggtattttggatttcaggacttttagccccggttagtgaaggaccagagaagctttctagttatgaatcgggtatagaacccatggggggggcttggttacaattccgaatacgctattacatgtttgcgctagtttttgttggttttgatgtggaaacagtctttctctacccttgggcaatgagtttcgacgtattgggtgtatccgtttttatcgaagctttcatttttgtgcttatcctagttgttggtttagtttatgcatggcgaanaggagccttggaatggtcttaactgaatattcagaaaaaaaaaaaaaagaaggaaa

SEQ ID NO: 463080 - DNA, 370 bp, Sorghum bicolor
actagtggaggaaggcctcctagggataagagacatagggctaaagagagagcgagaaaaaggatctttcgtgtataatcctgcataatctcgaatgttatcagttccggtacgtagaccaaataatacaatgcaagcaaaagttcctagattcatggagatatagaacagcatataagttatcatgcttgcatatccatcattggaggctccaacaattattccaataattacatatccgatttgccctatggacgaatatgcaagcatacgtttcatgcttgtttgagtaatagcaaggagattccccaatatcatgctaagaatagctaggatttccagaagaagatgccattcgttttgattgagg

SEQ ID NO: 463081 - DNA, 242 bp, Sorghum bicolor
  unsure (1)..(242): unsure at all n locations
tcatcaaacatttattggtacacttagaaaggtacccccagnaaaatcgaagcaagagtgtggtggtgtggttagacgaatcctttgtggttgagtccaaaaagagaaaaaatattgctgagaaattgacaaggtaagatttccatttcttcttcaaaagaagagtgccttttgatgcaagaattgcctttccttgatatctaacataatgagggggggatccataaagaaccatatggttt

SEQ ID NO: 463082 - DNA, 584 bp, Sorghum bicolor
  unsure (1)..(584): unsure at all n locations
catcaaaccnaccgagcaagttcaaattgacgtagcataaaacctattagtgcaaaagctccatggagagcgacaaaagtccaaagaccacctaattgacaccaacgagtaaaatccccctgtgcttccggtccccatagtagcaacaaagagtgtgctaaactattggcaggtgtggaaaccgccgcggttaataatttgcaacctggggggtaggaactagccaatccatgggtataccaagaagttacaaaagtagtccctgtaaaccaaccccctaaagcgaaataagcacaaggaaagagcaataagccggaccatcctacaaaaacaaaacggtcccttcgtaaccagtcgtccataatatcaaatagatcgttttcttctttagtaactctaccaacggctatagtcatagtgatcctcctattcaattacttcaaccattttcgagcacctcatattacttccagggcatacgatagtttgattatctgtggacgatttctttctcgttcaatgccctttttcagtcgtctcgaaaatagaaattttgcatttttatctatggggtcacaaccaag

SEQ ID NO: 463083 - DNA, 533 bp, Sorghum bicolor
tcatcaggtatggaaacctgctaagtggtaacttccaaattcagagaaaccctggaatgaaaaatgggcaatcctgagccaaatccacttttttcaaaaaagtggttctcaaactagaacccaaaggaaaaggataggtgcagagactcaatggaagctgttctaacgaatcgaagtaataacgattaatcacagaacccatattataatataggttctttattttattttgagaatgaaattaggaatgattatgaaatagaaaattcataatttttttagaattattgtgaatctattccaatcgaatattgagtaatcaaatccttcaattcattgttttcgagatcttttaaaaagtggattaatcggacgaggataaagagagagtcccattctacatgtcaatactgacaacaatgaaatttctagtaaaaggaaaatccgtcgactttataagtcgggagggttcaagttcctctatccccaaaccctcttttattcgctaaacatagttggtatccttttttttt

SEQ ID NO: 463084 - DNA, 661 bp, Sorghum bicolor
cgtatgaggtgaaaatctcatgtacggttctgtagagggacagtaaggatgacttatctgtcgacttttccactatcaaccccaaaaaacccaactctgccttacgtaaagttgccagagtacgattaacctctggatttgaaatcactgcttatatacctggtattggccataatttacaagaacattctgtagtattagtaagaggaggaagggttaaggatttacccggtgtgagatatcgcattattcgaggaaccttagatgctgtcgcagtaaagaatcgtcaacaagggcgttctagtgcgttgtagattcttatccaagacttgtatcatttgatgatgccatgtgaatcgctagaaacatgtgaagtgtatggctaacccaataacgaaagtttcgtaaggggactggagcaggctaccatgagacaaaagatcttctttctaaagagattcgattcggaactcttatatgtccaaggtcaatatggaaattctttcagaggttttcccttactttgtccgtgtcaacaaacaattcgaaatacctcgactttttcagaacaggtccgagtcaaatagcaatgattcgaagcacttctttttccattacactatttcggaaacctaaggactcgatcgtatggatatggaaa

SEQ ID NO: 463085 - DNA, 172 bp, Sorghum bicolor
  unsure (1)..(172): unsure at all n locations
agtcctattgcaagaatagnctactttttataatagaatcctcgttgtatgaggattctattataaataaaaaaaggttctttgataggaaaagaatactgaggacacaatataccaaaaacttntcgttctatcataatgataaatggagggatcccgttcctaagaatat

SEQ ID NO: 463086 - DNA, 581 bp, Sorghum bicolor
gcagttttcacactattttcctatgggttgcccgggactcgaacccggaactagtcggatggagtagataattcttccttgttacaatagaaaaaacccctccccaaatcgtgcttgcatttttcattgcacacgactttccctatgtagaaatagccgatttctattccgaagaggaagtccactaatttttagaatttttaattagttaaagtgattcacctactatggaacatttcagaatggaaaatgtgcaagttttatcttgatatcgatcttttctagtttattaattttgtctaatgattaattaagagtaagaggattcaccaggtcattgatacggataatatccaaataccaaatacgctcactttgtgatccatggaaagaaaagtgaattgttttggttttggtgaacatcaaagaaaaaacttgctcttcttccgtaaaaaattcttctaaaaataccaaacccaatcgttgcataaaagttcgtaccggacttttatgtttacgagctaaagttctagcacatgaaagtcgaagtatatattttagtcgatacaaagtcttgtttt

SEQ ID NO: 463087 - DNA, 628 bp, Sorghum bicolor
tcatcagacccgaatcgaatctctttagaaagaagatcttttgtctcatggtagcctgctccagtccccttacgaaactttcgttattgggttagccatacacttcacatgtttctagcgattcacatggcatcatcaaatgatacaagtcttggataagaatctacaacgcactagaacgcccttgttgacgattctttactgcgacagcatctaaggttcctcgaataatgcgatatctcacaccgggtaaatccttaacccttcctcctcttactaatactacagaatgttcttgtaaattatggccaataccaggtatataagcagtgatttcaaatccagaggttaatcgtactctggcaactttacgtaaggcagagttgggttttttggggttgatagtggaaaagtcgacagataagtcatccttactgtccctctacagaaccgtacatgagattttcacctcatacggctcctcgttcaattctttcgaagggatccttttcctcgttcgggagtctccgcccttcttccactccgtcccgaagactaactaagaccaattgagtcacgtttttcatgttctaattgaacactttccatttatgattaaaggagaaga

SEQ ID NO: 463088 - DNA, 566 bp, Sorghum bicolor
  unsure (1)..(566): unsure at all n locations
tgcagtttgttcatcagtattgaacatataataggaaagtagggattgagaatatcggtcgcgtagtgcaagtgggggatgggattgctcgtattataggtcttggtgaaataatgtcaggtgaattagtcgaatttgcagaagggacgagaggtattgctctgaatttggaatccaaaaatgttgggattgtattaatgggcgatgggttgatgatacaagagggaagttttgtaaaagcaacaggaagaattgctcagatacccgtgagcgaggcttacttgggtcgtgttataaatgctctcgctaaacctattgatgggagaggcgaaattgtcgcttcagaatctcgcttaattgaatctcctgctccgggtataatttctaggcgttccgtatatgaaccccttcaaacagggcttattgctatcgattcgatgatccccatagggcgcggtcagcgagagttaattattgnggacagacagactggcaaaacagcagtagccacagatacaattctcaatcaaaaagggcaagatgtaatatgtgtttatgtagctatc

SEQ ID NO: 463089 - DNA, 483 bp, Sorghum bicolor
gtactagaagaaaagcacctagacctaacaatattaagtgaatacccaaaattgtagtcattttatttctatctttccatacataaccaaagaatggaaaagattcttcaagagtctcgggtcccagaagcgcgtgataaatgccaccgaagcctaagactgcggaggaaattaagtgaagtactccggatacaaagtagggaaaagtatctagaacttctccccccggccctactccccaacctagagtagctaagtgcggaagtaaaatcaacccttgttcatacatgggcttttctggtacgaaatgggccacttcaaataggttcattgctccggcccagaatacgattaatccggcatgggctacatgagctccaagtagtttaccggacaaattgataagtctggcattcccagcccaccaagcaaagccggtggtttcttggtcacgaccagctaaaacgaaagttccattaaaga

SEQ ID NO: 463090 - DNA, 564 bp, Sorghum bicolor
  unsure (1)..(564): unsure at all n locations
gctatgccatcctaaggtgctactaaatggaaggatcttatcaacggcgatnnagggcgaaatcatagatcgaactgacgaattggcaaccttcggtgctatcatagtatccgctaagttcacgggctggagataagcggactcgaaccgctgacatccgccacagggtaaaccaccgcctctcaggcttccccgcggggggtccatagaggacaacgataggcaataactcccccccgaacacagcttacaactttcatcgtactgtgctctccaaagagcaactcttctcaaaatcccaaaacaaaaggtgctgagttggaatcccattctaaggattcttgtggttccggggaatccagctacaggagaaccaggaacggggagctctcccctttttccgcccgactctttgatcttaacttaagaatgctggttttaagaacgagtgattgcccttctccgacccttactgcccaaccggagagcggacggctaatgtgttccacttattgaacaggatctatggtcggtccgtgacccctggacgcccaaagcgtcctt

SEQ ID NO: 463091 - DNA, 636 bp, Sorghum bicolor
gaagtaataacgattaatcacagaacccatattataatataggttctttatgttattttgagaatgaaattaggaatgattatgaaatagaaaattcataatttttttagaattattgtgaatctattccaatcgaatattgagtaatcaaatccttcaattcattgttttcgagatcttttaaaaagtggattaaggggaggaggataaagagagagtcccattctacatgtcaatactgacaacaatgaaatttctagtaaaaggaaaatccgtcgactttataagtcgtgagggttcaagtccctctatccccaaaccctcttttattcgctaaccatagttgttatcctttttttttatcaatgggtttaagattcactagctttctcattctactctttcacaaaggagtgcgacaagaactcaatgaatcttatgctattcattaaatagatgatttcttttttatctcttttttttttatttattagagtacagtatcggcaaggaatctcgattattaattcgatttttttaagtattattaagtaagccatccacaatgcataggactacccctccccatttcctaattttgaatggaatactttattgattttttagtccctttat

SEQ ID NO: 463092 - DNA, 305 bp, Sorghum bicolor
  unsure (1)..(305): unsure at all n locations
actactgtataaacaaaaagttttgttgtaagcattacaaaatgtgcaaaaattttttgtgttaaggaatagattacccatgtttccttaccacacggatccactagaatgggttttctttattttgacacctaaaaatgcaaaaatcaattcttaaaaaaattggaggaatcgatctataataatgcactctgggggggggcncaggtattgggtgggtacctaaaggaacgttcaacggaggcgcagggggtagaaaggctgagcaaaatctattgctgcagctatacattcaatggaaaaga

SEQ ID NO: 463093 - DNA, 403 bp, Sorghum bicolor
aataatatactagataccctaaaatcatatgctggtatagagagagaggaataactagaatgtctggatctagtatatataagaataaaggatgattctacttttcataaagataggaaatttagtttgtatcttatctgcttgataaagaatcagagagagatggattagatattaatacgccagaaacagtttatcgtctattgctatggataggtaagtttttttaattaataaaaaataaagtatttagttaatattcactaagatcctaagattatggaccgagctggatgtgaaccattgaaagatatcaggaacgaatttacagtacatacacatgtaaccgatagtgaatagagcgatgaagaagcaataataagatataggataatgtatgatt

SEQ ID NO: 463094 - DNA, 606 bp, Sorghum bicolor
tcatcaaggcaagatctttcaaataccacacatgagtcactggacatgctagtttgatgtatcccatttgatatcttcgtatccgagaatcaacaaattctaccccgcatttttgacaaaatctttcgtcttcgttttcagctacgctcgctcgagagtttccacaagcacaaattccgctttttatgggtccaaagattctttcgcaaaacaatccatctttttctggtttatcggttttataatgaaaagtggagggccttgtgacttcgccaacgacttccccattaggtaggatttttttagcccaagcctttatttgttgaggggaaacgagtccaatttgaagttgtttatgtttatattggtcaatcataaaatagaaataagaaaaaaatttatatttattccgatcaaacatcctccctattaacccggaagttcttctcagatacaaggaaatggttcagttctagagccaaagatcgtagttctcgaacgagcactcgaaaagattctggcggatcctcgtgattaggcactctttttccccagatcggagcattaagtatttcttggcgagctataagatgatcagatttataa

SEQ ID NO: 463095 - DNA, 664 bp, Sorghum bicolor
ggattcattgaagtaataagactattccaattcgaataatagtggagaaagaatcgcaataaatgcaaagagggaacatcttgaatccggtattcaaggagttgaaccaggatttctaaatggataggatagggtatttctatatgtgatagataatgtaaatgcaaaaatttgtcttctaaaaagggaaatattgaatgaatagattgtaaattttgaaactttggtatttctttttcttctggacaagatagttgccctagcgagagtggaatttctacaacaatcccaaacccctcagatagaatctgagaataaaactcagaataaaaataattgcggtgatcaaacaatcgatcttggttaggataattaaccgaattaatccaaaaattctgctgatacattcgaataattaaacgtttcacaagtattgaactaaatttcttgttattacaaccaaaaatttccacgggttcggaaccatttaatccataatcatgagcaaatgcataaatatattcctgaaagagaagtgggtagacgaagtagtgttgacgagatttctgtttttctgaatacccttcgaatttttccatttgtatttctacttgaatcagagaaaaaagcatttctcgggttatcaaatgatgatacatagtgc

SEQ ID NO: 463096 - DNA, 510 bp, Sorghum bicolor
  unsure (1)..(510): unsure at all n locations
cagtgcttcctgatactgtatttgaagcagttcttcgaattccttatgatatgcagctgaaacaagttcttgctaatggtaaaaagggagggttgaatgtgggtgctgttcttattttgcctgagggattcgaattagcgccgcccgaccgtatttctcctgagttgaaagaaaagataggaaatctctcttttcagagttatcgtcccaataaaaaaaatattcttgtgataggccctgttcccggtaagaaatatagtgaaattgtctttcccattctttcccccgatcccgctacaaaaaaagacgttcatttcttaaaatatcccatatatgtagggggaaaccgaggaaggggacagatctatcctgatggtagcaagagtaacaatacgggctataatgctacgtcaacaggtattagaaaaaaaatactacntaaagaaaaggggggatatgaaatatccataggggatgcgtcggattggcgcccagtgattgatattatac

SEQ ID NO: 463097 - DNA, 588 bp, Sorghum bicolor
  unsure (1)..(588): unsure at all n locations
tttggccctccttactgggaatcacaatagaagtactcgtaattgtggggggtaggagagagaaatatccgcatcgatacaacaacgtattggtcctgaatatgctggccccctgggactgcttcaagctatagcagatggaactaaactacttttaaaagaggatatcctcccatcccgaggagagattcctttattgggggggggtccctctatagcagtcatatccgttttattaagttttttagttatccctttgggatatcgttttgttttagctgatcttagtattggtgtttttttatggattgcgatttcaagtattgctcctattggtcttctcatggcaggatatagctcaaataataaatattctttttcaggcggtctacgagcgggtgctcaatctattagttatgaaataccattaactttttgtgtactagcaatatcttttcgtgtgattccgtaaaataggatctttttcctctaaaatacattgaatgcttatcttcctttgcttaattctgattcnccgtggtaagtaaaactcgatagctatatgaatgaaacaaaacagnttattaa

SEQ ID NO: 463098 - DNA, 623 bp, Sorghum bicolor
aatactattgtcaagtacctttagggattaggatctcggcaagataggcagtgcttgaagaatgaaaaaaaaccgatctacttctttttggtattttagactaaattcttttgttcctcgatgctcaataaaaccctctttttttaagatagaatcttcctccgggctcccatattcgtcttctgagtcttcctctggggcttcctctgagtcttcttctaaagtcccatattccttctctgagccatcttcagagctcccatattcttcttctgagtcttcctctaggatttcatattcgccctctccctctcgggtcctatatttgttctctaggctcccatattcttcctctgagtctttctctagagtcctatattcctcctctaggatcccatactcatcttctagggtttcatattcgtcctctagagtcctatattcgtcttctaggatttcatattcgccctctccctcttcggtcctatatttgttctctgggctctcatattcgtcttctgagtcttcctctcgagtcctatacttttcctctcgggtcccatattcttcccttagggtcctatatctaaatttaacaattcctgaacccctttatcttttct

SEQ ID NO: 463099 - DNA, 404 bp, Sorghum bicolor
  unsure (1)..(404): unsure at all n locations
ggtaaaaatacttngnaattnctggcttttcgacattcnnacgccgggggtgggggttaaaattcacccatcncccnccnttcatggtcatcccatccataatccnctcnccnaccaatgttttcatggcctcatanttcangtttgtcagcatccccacgctgcgcatcgacgctgnccgttttttaacaatcggggggggtaccacctgctcctttttcgtctaacactaaatcccaatttcatcaagaaccagcagatccacttcgcacagttcccgnaaaaatttttcgcctgactgcccatngtcatagntggcgtgcagggcactcataacatcagccacggnaaccacaatcaatgtctgaccgtctttcaacaagcaattcccgatagctgccgct

SEQ ID NO: 463100 - DNA, 511 bp, Sorghum bicolor
actacattcttctagtttctttaataggtgcaattactatggctcgacaataagaaatacttagaatgagtcaaaattcttagaatttcaaatataaaataaataactaaagaatcacaattttgatttagtaaaacccatctactgccaacacaacaaaagagaaaagaaggtatttgttgtgtaattgttctattctaattaattgaatcggttcaattcttgtcctcatattgaaatgaatcgagattgataaggagttagttaatgatgtttgagcatgtactttttttgagtgtctatttattttcgattggtatctatggattgatcacaagccgaaacatggttagagctctaatatgtcttgaacttatactgaattcaattaatctaaatctcgtaacattttctgatctatttgatagtcgccaattaaaaggagacattttcgcaatttttgttatagcccttgcggctgctgaagcagctattggactatccattcttt

SEQ ID NO: 463101 - DNA, 549 bp, Sorghum bicolor
tgcagttttctcaacagaggaaaggagcaatttgagctgagcggaaaatccatacctctcttatccattccatttagagcatatggatcgatttataagaatcgagtgttttgtttttatgttattttgtgatagaatgaaaagaattctatatagaatgggttgggaattatgcctagatcccgtataaatggaaatttcattgataagacctcctcgattgtagccaatattttattgcaaataattccgacaacctccggggaaaaaagggcatttacttattatagagatggtgcgatttgactcttttttttattttagccctacctatatctcattcttacgagaaagagagagggttcgcatagagagaacaaaattagtaaaggaaacccgcgcttggggaaggtgaggtgaactaacaattccttctgtcgtgtatcctcgattgatgtggcctcagatgcttcaattgtagatttgagtattgagcgaaaggttacacctacaggataggttctgtattacaggccaatccgactctac

SEQ ID NO: 463102 - DNA, 625 bp, Sorghum bicolor
gcagtattcatcactcttgggggagaaggatggattgttagtgtggatgatttagaagatataatgggggggcatgtatggttgggttccatttgtgtacttggcggaatttggcatatcttaaccaaaccctttgcatgggctcgccgtgcatttgtatggtctggcgaagcttacttgtcttatagtttaggtgctttatctgtttttggttggatgcgcttgttgttttgtctggttcaataatacggcttatccaagtgagttttacgggcccactggaccagaagcttctcaagctcaagcatttacttttctagttagagaccagcgtcttggagctaatgtagggtctgcccaaggaccgacgggtttaggtaaatatctaatgcgttccccaacgggagaggttatttttggaggggaaactatgcgtttttgggatcttcgtgctccgtggttagaacctctaaggggccccaacggtttggacttgagtaggttgaaaaaagatatccaaccttggcaagaacgacgttaagcagaatatatgacccatgctcctttaggctctttaaattccgtgggtggcgtagctaccgagatcaatgcagttaataatgtc

SEQ ID NO: 463103 - DNA, 500 bp, Sorghum bicolor
tttattggatacctaacttacccatgtttatttttatgttgggagctagaccctactgctgccccgctttctatctatctatgaaagagtaaggaggtcttatccacaatccaaaaattgatttttgatcagcctattcaatctaattctcgacagaatcagtagcctttactttagtgtatgtagggagcgtaagatatactaagtgtatgtagtaagatgtacgataaataaaatgtatgataattaggaagtctttctatttcttcgcaaagtcccttcttcaatcttagattgaaaaaagactgccccttagggacctttggctacgaagattgctgacatcttagtctactagttttaaattcccgaatcgaatcgatttaaattaataaaagaataaggaaacgctacctcatccctattggtaaccggttgggccactgcccacaaaacagaccctagtctgagggtagaactttggtatggattctcaaaat

SEQ ID NO: 463104 - DNA, 643 bp, Sorghum bicolor
tgcatcttttcatcacaaaggagtccatattaacaatgaaaatttgaccagatttttttatgtgtgatttaaatggacataaattttcacaaataaattgtccaaggtgaattattgccaatgtctcttcccatgagtcatgatggagaaagtgccaattcaaatggaatggctccaacatgatgttactgccaaaattcgaaatcctttgattttcgtgtgattaaagagtatttaagtccttgaagtacttggaaggtttgtttcaaattgtcaaggaacaagtatttttttaacaagatctgattatgcgttaataaatagtaagatgaagaaaaattcgatatactaggtacaataacgcctaagagcccaaaaacatctcgaataggaattctaggattcgattcttttaccgcattgggatatttcgaattcttgaataaaccaattcgagaacagttggatgccaacaaaatcatcaaagatggatattctttatttcgattcaacaaggtgccaataacttcttgatgttggctaagtgattgaatcttcgccttggaataaaaggaattggtattgttgcgatctaacctattattgggaatcagtcctacacttgtcctatcatacctttttc

SEQ ID NO: 463105 - DNA, 572 bp, Sorghum bicolor
  unsure (1)..(572): unsure at all n locations
atcaaatcaagnaatacaattgataacaatatgctgcatagaacttgatatggaatccagttccatatagaagggaattctatatatcggattagataatgaatctaacttaggaataaaaaaaatcccatatacatttgtttcttctattttgtttgcgtattttctcattttctattgaatccgattctaaaatcattccttagaaagccacacaaaagatgactgtcttataggcattaaggatatagatctaaccagattccgcccccctgaatgcatatatattttacctcttccataatatagtctattctctctcctacaactctaggttgtatattcatacgcctttcgaactatttagttttccaaccaagaggattatccggaatcatgcatgaattgggctaagctaaaaaaaaagactatttcaaaaactagttaattcaatgatgaccttccatggattcacctatataggctgcggctaacgttgcaaaaataagagcttgaataccgcttgtnaataatccaagaaacatgaccggtttagggactactaaggggac

SEQ ID NO: 463106 - DNA, 617 bp, Sorghum bicolor
ttcatcagatttaaattaagtaaaaaaaattgctttatgtatacttaaatcgtataaataggggtaaacggggtctctgatgtttcatagaaattgtttgttacgtcagaatcagaagaaactaattctgtatggagaaacaaaatatctctcatttccgacgcgaatagatttttttttttaatttcgaaataaaggttcttgtcttgtggggaacgatgcacaaatttttggaatccggtaccaacaggtataatcccccccagaactacgttttctttcaggcctttcaaccaatcaatacgacctcgtagggcagcttttgctaaaactcgagcagtttcttgaaaacttgcttcagatatgaaactttgggtattcagggaagcccttgttattcccaataagattgcccgataatagatcgattcatctaaagcccgccctgctcgttccgctcgcaatagtcctattaattccccaggtaaaaaaacattagacattccatcttcggaaacccttacttttgatgttacttggcgtataataatctctatatgtctattatggatctgtaccccttgggatcgataaaccttttggatcttattaaccaa

SEQ ID NO: 463107 - DNA, 566 bp, Sorghum bicolor
  unsure (1)..(566): unsure at all n locations
tatagtataccacctaacgattttatttccttttgaggtaaaagaaattatgaactgcaaattcggcaaaacaacaagtattgttaaccaaggnaaaataactcatgataaagtaataaagacaagatacgtttntgaccagnaaaagcccatgctcgattatttcgagcacaggcttcttcggtaaagaggaatcagacgattcaagtggagttttttgtaacgtatcaataagatagagccatgctgcgggttgtttcagaccttaaataaacgcggacacttaaaaaatccgttgggcaagcagattcgcatctcttacaacccacacaatcttcggttctcggcgcggaagcaatttgcttggctttacatccatcccaaggtatcatttctaatacatctgttgggcaagctcgtacacattgagtgcatcctatacatgtatcataaatttttacagaatgtgacattggatctctaaatttgccttttcaacataaaaattttcgatctggtaaaaatgaaattagtactatataaattagatgtattgtagacaccag

SEQ ID NO: 463108 - DNA, 586 bp, Sorghum bicolor
  unsure (1)..(586): unsure at all n locations
ttcatcacatggtttcataaaatctgtacgattttcccgatctaaatcgagtgggtttccaatgaanaagatcttgttcagcatgttctattcgatactggtaggagaagaacccgactcggtattcttaaaaaaagagggaagcagaaccaagtcaagatgatatggatcgccccttcttcttgcgccaaagatcttaccatttctgaaggaactggggctacatttcttttcaatttccattcaagagtttctatctgtttccacgccctttttttgagacctcgaaacatgaaatggacaaattccttctcttaggaacacatacaagaaaaaggataatggtagccctcccattaactaatttaagaatttcatagtaatagaaatccatgtcctaccgagacagaatttcgaacttgctatcctcttgcctaataggcaaagattgacctctgtagaaagactgattcattcggatcgatatgaggacccaactccgttgcattgccagaatccatgttccatatttgaagcgggttgacctctgtgcttctctcatggtacaatccttttcctggtgagc

SEQ ID NO: 463109 - DNA, 646 bp, Sorghum bicolor
  unsure (1)..(646): unsure at all n locations
gtagttcatcattagnaagntttggtgttgctcatattttacaanagnaacttacttataaatctgatcatcttatagctcgccaanaaatacttaatgctacgatctgggngaaaaagagtgcctaatcacgaggatccgccagaatcttttcgagtgctcgttcgagaactacgatctttggctctagaactgaaccatttccttgtatctgagaagaacttccgggttaatagggaggatgtttgatcggaataaatataaatttttttcttatttctattttatgattgaccaatataaacataaacaacttcaaattggactcgtttcccctcaacaaataaaggcttgggctaaaaaaatcctacctaatggggaagtcgttggcgaagtcacaaggccctccacttttcattataaaaccgataaaccagaaaaagatggattgttttgcgaaagaatctttggacccataaaaagcggaatttgtgcttgtggaaactctcgagcgagcgtagctgaaaacgaagacgaaagattttgtcaaaaatgcggggtagaatttgttgattctcggatacgaagatatcaaatgggatacatcaaactagcatgtccagtgactcatgtgtggtatttgaaa

SEQ ID NO: 463110 - DNA, 651 bp, Sorghum bicolor
gtacagtagttcatcaacttgctgccgttactcaaagttttctgttgaggtctatcccgtagaggtagtcaaattggatcagtgatcgatttctaggtttcgtcgtaaacctaattggttacttccaattacgtaaatcaatagttcaaaccgcactcaaaggtagggcatttcccattgatataggaacttttgtaccagaaacaatagtatctccaattatagcccctctgggatgtaaaatatatctcttctcaccatccccatagtgtatgagacaaatgtatgcatttcgattagggtcgtattctatggttacgattctaccagatatgtctttttgattccgtcgaaaatcgattttacggtataggcgcttatgacctccccctctatgccttgcggtaatgattcctctggcattacgacctttaccacaacggtgccgtccatggatcaatttatttcgtggattggatttcacttgcctgtctacggttcccttgcgtgtgctcgggataggtgttttgtataaatgtttcgccgtattattaagtattctcctttagttcgtttctctatctagaagtggaatagaataacccggttgaagggtaatgatcatacgtctgtaatgcattgtatgtccca

SEQ ID NO: 463111 - DNA, 580 bp, Sorghum bicolor
  unsure (1)..(580): unsure at all n locations
caataacagtaagaatttttcaacacaaaattctctcaaacaanagaaagaaactacctttttcatatatagatttagaatatgttccctatgctaactgggttcattagttatggtcaacaaacaatacgcgccgcaagatatattggtcaaggtttaataattaccctatcccacacaaatcgtttacctataacgattcactacccttatgaaaaatcaattacatcggagcgtttccgggggcgaatacactttgaatttgataaatgcattgcttgtgaagtatgtgttcgcgtatgcccgatagatctaccccttgtggattggaaatttgaaaaggatattaaaagaaaacaattgcttaattatagtattgatttcggagtttgtatattttgtggtaactgtgttgaatactgtcccacaaattgtttatcaatgactgaagaatatgaactttctacttatgatcgtcatgaattgaattacaatcaaattgctttgagtcggttaccaatctccataatgggagattacacaattcaaacaattaggaattcgcctcaaagtaaaatag

SEQ ID NO: 463112 - DNA, 360 bp, Sorghum bicolor
ttcatcattcttatcacaaccgttctttgtggctgtagtttttaccggttctccaggaaagttgttggtcttgcagaaacaattaggggatttcaactaatcctttccggagaattagacggcctacccgaacaggctttttatttagtggggaacatcgatgaagctagcacgaaagctttaaacttagaagaggagagcaaattgaagaagtgaaattaaatctttatgtactgactcctaatcgaattatttgggattgtgaagtgaaagaactcattttatctactactagtggccccattggtgtattccctaacctcgcccccgttttctctgctgttgctgtgggtcctttgc

SEQ ID NO: 463113 - DNA, 598 bp, Sorghum bicolor
  unsure (1)..(598): unsure at all n locations
atgagttactataatcgccctttctattatactgngatagaacatagtagaatagaacgactctttcttactttcttaaaagatttcttacaagagtgaaacaaaactaaagaaagaaaaaataaagtttggcaaaattattaatgcaaaacgatcaattaaagaaaagagttgatactacaattcgactactcaatcaattggtagtatccctagagtccactcctcccccatactactagcgaaagagaaaatgtaaagactaccattaaagcagcccaagcgagacttactatatccatgtaaattatgtctcctatttctatgaaagaattcttctactattgatcaataatcatagtggaatcaagggtacagagtcaaaaggccattctattctgccctaagactatggatgaacccgttaaaggaatttactcctaacaaattcttatatgatttctggtagaattggagagcattaagtagaaatatgatacatcgctctttccctaaaaaagagtaggggatgctctgaatagaagacgcgggaatagagagattttttctttcgtttgttaccttttttataagcaaa

SEQ ID NO: 463114 - DNA, 626 bp, Sorghum bicolor
  unsure (1)..(626): unsure at all n locations
agttcatcaagtaatggcactcgnttattatcaacccgactgcaatctttttctgtcggtaaggattgcaccagagcaccttctacttctaataggccatgaactatagatagagaagaatcattctgagcgagtccataagaagcgacccactttttcatcggttccgggggaagaccaaagatcttgcgcgaccggtccgccagaaaaactcaaaagagaaagaagtctcgttaatctcttcatgctcgttccaagttcgaagtaccgtttggccaaagaaaaagccgcttcctgacacgattgcctctttatatagatagatataggatctatggggttattacttagaagtctattttgtacaagatcccctcctatctgatagaaaagggtcccatgatcccgagccggtcttatcttggctcgcaaaccccaagtttgtctatgaagagctaatctaattgtattagtttctataatggatttcttatgtggaatactaatggatagggcctcgttgctaagtgctacaagatctagtgcactggaactcgtggttatggacccgaatcctttagtatggaacattgtcttttccaagtaaaaacccctagtatatgaaa

SEQ ID NO: 463115 - DNA, 569 bp, Sorghum bicolor
  unsure (1)..(569): unsure at all n locations
tagttcatcatcctctaaatacattgatgcttatcttcctttgcttattctgtattcgcgttggtaagttaaactcgatagctatatgagtgaaacaaaacagcttattaatttgtagtaaaaataaaaaatctcatttcctacgtacaagaaaaagttaaagtaaacataagcagtgtaaactctttaccccaaggttgagattgtttaattagtcatcatatcttgaagcgggcaagaataaaggattcgcgatctggaattccattactagaatattttgagttattactattatttaaacttataaccatcaggcaatccatctttggttngtgagggtttaggatctctcctgtccctcccggntttgtnctgtgcgtttctccctccttggtcctttttcctccttccggtctcttcctctggtcttgcccttggtggttttggtcccgctgtccttttcttcgattccggtctcgggtctgttcccattgccttgtttggttttggctcttccggccgcgtttaccctttattcttttttttccgtcttcccgttccggggt

SEQ ID NO: 463116 - DNA, 616 bp, Sorghum bicolor
  unsure (1)..(616): unsure at all n locations
tacagtagttcatcatgaaccctgttgtaaacggccaanaccagtccgaattgatcttgtaacagatctgcaaccgaacgaatacgtttatttttcaagtgattcatatcgtcatcgtcaagtatacccgttccaaatttcattccaatcaaatgatccgtagcggccaatacatctcgtggtaacaagaatgtattgttctgagggatatcaagattcagtctccgattcatatttcgtcgaccaactcttcctaattcacatttttgttgaaaaaatttcttttgtaattcctcgcataaggactccgaaaataccaggtccccacctacacaagcaaattgttgataaaactccaaaatagctttttcttttgactcaatcctcttcttctccttagcattcgggaaagacaagaaaatttcggggtaggaaacattatctaaaatttctcttagattcgaacccatagctgatgatagaactaaaatagatatcttttgttttctactcacgcgagcccatatcctttcttttttatcaattgctaattccgaccttcctccccaatctgatattatagtaccggtgtatatagaaattcccttatggtcta

SEQ ID NO: 463117 - DNA, 609 bp, Sorghum bicolor
tttaatcgttcgatttttttcctattttattagtagtcttatagtagtcttagattttgcattttgatgagcctcgttttgaggaattcatggaataatccattttcatggaataaagaataagaacaaggatatgagtctatcgcttaaaagaaaagatctcatgatagtcaatatgggtcctcaacacccatcaatgcatggtgttcttcgactgattgttactctcgatggtgaagatgttattgattgcgaacccatattagggtatttacacagaggaatggaaaaaattgcggaaaacagaagtattatacaatacttgccttatgtaacacgatgggattatttagctactatgtttacagaagcaataacggtaaatgcaccagaattcttagagaatattcaaataccccaaagagccagctatattagagtaattatgttagaattgagccgtatagcttctcatttgttatggcttggaccttttatggcggatctcggggcacagactccttttttctacatttttagagagagagaattgatatatgatctatttgaagctgctacaggtatgcgaatgatgcataattactttcg

SEQ ID NO: 463118 - DNA, 640 bp, Sorghum bicolor
  unsure (1)..(640): unsure at all n locations
tagttcacattccatatcttgatttcgagnaagcaatgcatcgtgaaccaatatatatatcgtctgctaatacacgaccaattagtgtttggacaaaagtttttccgtcatcccattttgaggactcacagaaataccttggatagtaccacaatctcttctacgcacaataatatgttgaactacttcaacaagtctacgtgtaagatagccagcatccgctgttcgtacagcagtatctacaaccccttttcgggctccgtagcaggaaattatatattctgtcaaagaaagtccctcgcgtaaattgctttgaataggtaaatcaatcatttgtccttgaggatccgccattaaccctctcatacctactaattggtgtacctgagatgcatttcctctggctcctgaaaaagacattagatagactggattagaaggatccgttattcgaaaattcgaattcatttcttgtttcaaatattcacttgtagcataccatatctcaacggattggcgtaatttttctaccgcgtgtacagctccataataatagtgtttctccaaaagaaaactctgttgttccgcgtcttggactaaccatcctttagagggtattgttaaaagatcctcgattcct

SEQ ID NO: 463119 - DNA, 215 bp, Sorghum bicolor
  unsure (1)..(215): unsure at all n locations
tttgcatataaatttcaatctcactaagnaaaagttttagnaaaactttttctttatgaaagaatcgaagatttcgaatctatgattagaagagcggcggataataaggatccgcacaaaagattgcatagcttagtaacatcatactgacatgcatcatttaaccactgagattgtagagcaggtactagtattgtggattgatgcatttcagt

SEQ ID NO: 463120 - DNA, 611 bp, Sorghum bicolor
  unsure (1)..(611): unsure at all n locations
attcatcatccttcanacctacgagtgtaataggagcatccgttgacaaagggtcaccctaagatgatcatctcatggctattgggaacgaatcaaatcagatggttctatttctcaacctttctgacttgcntcctacggnaaccaaggtcgaaagggattgaaaaagtcagtcattcacaaccactgatgaaggattccntcgaaaagttaaggattagtagttctttttcgaaatccatttcgaaaaagaatggattcggtcttatacatacgcgaggaaggtaatcaaaaaagaaagaagacgagttcttctttcttttatcacttaggagccgtgcgagatgaaagtctcatgcacggttttgcatgagagaaagaagcgaggaatcctcttttcgactctgactcccccactccagtcgttgcttttctttctgttacttcgaaagtagctgcttcagctttagccacgcgaattctcgatattcctttttatttctcatcaaacgaatggcatcttcttctggaaatcctagctattcttagcatgatattggggaatctccttgctattactcaaacaagcatgaaacgtatgcttgcatatt

SEQ ID NO: 463121 - DNA, 632 bp, Sorghum bicolor
  unsure (1)..(632): unsure at all n locations
agttcatcattaaaanatttacttaagaattctttatttttattattgaatttccattctcaacananaactcaanatgatcaatcctgaaatgagaaggatcgaccctttcccaacaaataaactatcaacctcaaaaaagcggaattaatttaatgaattaatagatttttctgtaacaaaaacaattaactattaaacaaataagctattaaacaaataagctatgccaatgaaaagattggtcgtttttgggtagttataaaattctcatacttcttcgactcgaataacaaaagaaagaaattttttttgtaaagtaaaattaaggtctttgcttttacttatagcattctttcttttacctaaaagaaagaactcaaaataaaaaataagaaaagtacgatttcgaatccattctatccaacgaacagttcttaccttaaccttaccgaaatggatcattctagatatttaaagaatcacagatcgagatcgttttcgcttaaccaaagaaaagaaggacgcttcttttttactaataatacaagaaaacaaataatacaacaaaaatctatctctatcataaagggataggtgtcattttctatacagtgttttacctcattaaa

SEQ ID NO: 463122 - DNA, 653 bp, Sorghum bicolor
  unsure (1)..(653): unsure at all n locations
tacagtagttcatcatattcnactcttatgnaaatcgagtaccggtattttaccggnaatccatacataaaccgtattcgtttattgttagagaatgaatttcatctaattagttacttttttggggttaaaccgcacccctgccattttctagttccaactttgtttgtgtatgttcaatgaataattggaaagaatccacctcattctcactccatttgccgactccttcttttatggatttgctctcatctttagaccccaaaaagcgtatattgatagtaacctaataaaataaaaaccaagcaaacgctctttttcctaaattaaaatatgggatcctttttatttaagatcctcttttctccatctcatttctacttctactgcttattgggatgtctatgtgacccatagaaagttggtcatataatacatacataattgtatgtataactataagaaaaaggaagggaaattggataagataagaaagattttggattatacatatagaaaaacaaaagtagaaaagaatgaaaaatagaatagaggggggtttcgaatccaatcaaaaaacccattttggtcttagtatggataagagatcttcctatgttatattattccactatcaaccatgaattgatttg

SEQ ID NO: 463123 - DNA, 606 bp, Sorghum bicolor
  unsure (1)..(606): unsure at all n locations
acaaaaatacaagnagtcgactaggtggattggtccggtgaagaaaaaaaagcctacagaactcaaatcttttccggagatattcattttcctgaagaggcggataagatattaggtggcagtttgatacccccagaaagagaaaaaaagattctaaggaatcaaaaaaaggaaaaatgggtttatgttcaacggaaaaaattctcaaaagcaggaaaagtattttgtttcggttcgacctgcagtctcatatgaaatggacgaagggagaaatttagcaacacttttcccgcaggatctcctgcaagaagaggataatctccaacttcgacttgtcaattttatttctcatgaaaatagcaagttaactcaaagaatttatcacacgaatagtcaattcgttcgaacttgcttagtagtgaattgggaacaagaagtaaaagagggggctcgtgcttctcttgttgaggtaagaacaaacgatctaattcgcgatttcctaagaattgagttagtcaagtctactatttcgtatacacgaagaaggtatgataggacaagtgtaggactgattcccaataataggttagatcgcaacaataccaa

SEQ ID NO: 463124 - DNA, 566 bp, Sorghum bicolor
ctaaaaaaaaaggtaacccaattcatagtatcatgcttattgattgctacagttaacctgaacccactgtatcctaccgggcccacctaatcggatagggggagttgctgatccatgccacatacttccggatactacaatagctggacacaaaacagattggaaactactggaaggttcagtgggaatgttgcccatacttgaccctgcgtataaacattgaggactgactgacacttagatcgaataggccctctaataaccccaactatcccataccaattttacccgaatctattgcctccatcaccgaaagccacaaaccatcaacaccccactcatgactgacagtatgtacttgagaagaaacaaacgctggatctacacacccatatactagtgccatataaacccaaatcatcaaatgcaccaaatgcaacacatgacaccattgcatgaaataaatgaactaccaatatattctgcagatactatgaaggattgaatcaaacgatccttacagaataactataggtcccaatatacccaaagcctgatagctgcca

SEQ ID NO: 463125 - DNA, 658 bp, Sorghum bicolor
  unsure (1)..(658): unsure at all n locations
tacagtagttcatcaattttattgggcgaaggcgggggctttaaatcgaccgatggattgcttcactcactaacatcattaacaaacaaaanaataaatagagggattccaaccatcagagcaaaggttttctctttgttatttttacaaatagaaataggtaaccaatttctagattatggaataaaaccgcgttataacaataagaattccgcgggccctttccgctctaatcagataaaggggagtaaggacccgctaagttcctactttttcatgtttacaatctggatcctccgattactatagagatgaacccaatccagaatacgaaccgtaaaagaaaacacctattaaaccaatcacaagaataccagttacagtacctatcagccaaagaggaattcttccagtagtatcggccatttcccctactttcctccacattttctcaagtggtcatgctagagacaaaaacagtcatggatagttataaagatggtatccttccaaatgggataagagaattcttactactctctttctttctctcaattgaagaagtaattggaaaataaaacagcaagtacaaaaatgagtaataaaccccagtatagactggtacgattcaattcaacattttgttcattcgggtttg

SEQ ID NO: 463126 - DNA, 348 bp, Sorghum bicolor
ctgtaccatatcatgccgttcctagagttgcgatctcaagattgctacttcttccatgtttccgcattatcctattgttccatggagctagggtccgcattcggactcaacacgtgtttcgcacgactctgccgcccggccatatgcctgttccactgaatcccctccctttttcatgggcccatatctttacggcttcggagtggggggggtttctcctgttgcccatctgctgtgtttcctttcgtccgggtatatgcctcctctttctcctctttctttgtctttgtcctttggtcctggagccttcctgctgttctgtcccgctttgctgtttcctgtggtctc

SEQ ID NO: 463127 - DNA, 366 bp, Sorghum bicolor
tgttcattagaaatgaaaacgtgactcaattggtcttagttagtcttcgggacggagtggaagaaggcggacctcccgacgaggaaaggatcccttcgaaagaattgaacgaggagccgtatgaggtgaaaatctcatgtacggttctgtagagggacagtaaggatgacttatctgtcgacttttccactatcaaccccaaaaaacccaactctgccttacgtaaagttgccagagtacgattaacctctggatttgaaatcactgcttatatacctggtattggccataatttacaagaacattctgtagtattagtaagaggaggaagggttaaggatttacccggtgtgagatatcgcatta

SEQ ID NO: 463128 - DNA, 642 bp, Sorghum bicolor
  unsure (1)..(642): unsure at all n locations
gtagttcatcagaaaccaaccanatgtcccagtggataaataaggaatacggaaacaaaacagcgattggaccagagaatgaaattgcattataaggccgcaattgaacagaccgagcaagttcaaattgacgtagcataaaacctattagtgcaaaagctccatggagagcgacaaaagtccaaagaccacctaattgacaccaacgagtaaaatccccctgtgcttccggtccccatagtagcaacaaagagtgtgctaaactattggcaggtgtggaaaccgccgcggttaagaaattgcaaccttccaaataggaactagccaatccatgggtataccaagaagttacaaaagtagtccctgtaaaccaaccccctaaagcgaaataagcacaaggaaagagcaataagccggaccatcctacaaaaacaaaacggtcccttcgtaaccagtcgtccataatatcaaatagatcgttttcttctttagtaactctaccaacggctatagtcatagtgatcctcctattcaattacttcaaccattttcgagcacctcatattacttccagggcatacgatagtttgattatctgtggacgatttctttctcgttcaatgccctttttcagtcgtctcg

SEQ ID NO: 463129 - DNA, 591 bp, Sorghum bicolor
  unsure (1)..(591): unsure at all n locations
agttcatcacaaatgatcggcggnaaaaggggagtgctccccgttcctggttctcctgtagctggattccccggnaccacaagaatccttagaatgggattccaactcagcaccttttgttttgggattttgagaagagttgctctttggagagcacagtacgatgaaagttgtaagctgtgttcgggggggagttattgcctatcgttgtcctctatggtagaacccgtcggggaggcctgagaggcggtggtttaccctgtggcggatgtcagcggttcgagtccgcttatctccagcccgtgaacttagcggatactatgatagcaccgaaggttgccaattcgtcagttcgatctatgatttcgcattcatggacgttgataagatccttccatttagtagcaccttaggatggcatagccttaacgttaatggcgaggttcaaaagaggaaaggcttgcggtggatacctaggcacccagagacgaggaagggcgtatcatgcgacgaaatgcttcggggagttgaaaattagcttagatccggagattcccaatttggtcaaccttttgaactgcctgctgaatc

SEQ ID NO: 463130 - DNA, 367 bp, Sorghum bicolor
  unsure (1)..(367): unsure at all n locations
caaagggcgttctatgcgttgtagatcttaccagacttggtcatttgtgatgcctgtgaatcgctgaacatgtgagtgttggctacccatccgaagtttcgttggggactgggcggctccatngtacaaagatcttctttctaagagattcgttcggcctcttattgtgggtgggcgatatggaaattctttcacggttttcccttctttgtccgtgtcnccaacccttcgntttcctcgtctttttcagaacaggtccgggtctcttgctttgattcgaagctcttctttttccattgcgctctttcgggggcctttggactcgctcgtntggatgtggcnccttctggatttccggtccttgcgg

SEQ ID NO: 463131 - DNA, 590 bp, Sorghum bicolor
  unsure (1)..(590): unsure at all n locations
atcgtatgatgaagtaccacatgnagtggnatatatagnaaagggaatccaaatccgccgaatcgctcatgttatgatcttctacatcctaggtctccgcgttccgtcatctggcttatgttcttcatgtagcattcagatcgaatgactctatgaaattacgtcgatacttccacatattatgggtaacgtaggagacatccctattttcacccggggttcttaattaccactgcttagctttcaattcgcctctgaccatcaaattaaatgtgaataacccgtcctcctctctttgaaacaggggcgcttccggttctgtgcgtgcttcaaacaattttgtcttctccatattaccatatctctagagtcaataattttctatgaggaactactgaactcaatcacttgctgccgttactcaacagttttctgttgaggtctatcccgtagaggtagtcaaattggatcagtgatcgatttctaggtttcgtcgtaaacctaattggttacttccaattacgtaaatcaatagttcaaaccgcactcaaaggtagggcatttcccattgatataggaacttttgtaca

SEQ ID NO: 463132 - DNA, 410 bp, Sorghum bicolor
gggcgaaggcgggggctttaaatcgaccgaggtttgcttcactcactactgcattaacaacaaaacaataaatgaggattccaacctcagagcaaagttttctctttgttatttttacaaatagaataggtaaccaatttctagattatgagaataaaaccgcgttataacaataagaattccgcgggccctttccgctctaatcagataaaggggagtaaggacccgctaagttcctactttttcatgtttacaatctggatcctccgattactatagagatgaacccaatccagaatacgaaccgtaaaagaaaacacctattaaaccaatcacatgaataccagttacagtacctatcatctcatgaggatttctttcagttgttttggttctgtcctcttcttttt

SEQ ID NO: 463133 - DNA, 625 bp, Sorghum bicolor
  unsure (1)..(625): unsure at all n locations
ttcatcattactttataatacttaaaaaaacgaattaataatcgagaatccttgccgatactgtactctaataaataaaaaaaaaagaataaaaaagaaatcatctatttaatgaatagcataagattcattgagttcttgtcgcactcctttgtgaaagagtagaatgagaaagctagtgaatcttaanacccattgataaaaaaaaaggataacaactatggttagcgaataaaagagggtttggggatagagggacttgaaccctcacgacttataaagtcgacggattttccttttactagaaatttcattgttgtcagtattgacatgtagaatgggactctctctttatcctcgtccgattaatccactttttaaaagatctcgaaaacaatgaattgaaggatttgattactcaatattcgattggaatagattcacaataattctaaaaaaattatgaattttctatttcataatcattcctaatttcattctcaaaataaaataaagaacctatattataatatgggttctgtgattaatcgttattacttcgattcgttagaacagcttccattgagtctctgcacctatccttttcctttgggttctagtttga

SEQ ID NO: 463134 - DNA, 586 bp, Sorghum bicolor
  unsure (1)..(586): unsure at all n locations
aattccttctcttaggaacacatacaagaaaaggataatggtagccctcccattaactaatttaagaatttcatagtaatangaaatccatgtcctaccgagacagaatttcgaacttgctatcctcttgcctaataggcaaagattgacctctgtagaaagactgattcattcggatcgatatgaggacccaactccgttgcattgccagaatccatgttccatatttgaagcgggttgacctctgtgcttctctcatggtacaatcctcttcctgctgagccccctttctcctcggtccacagagaaaaaagtaggactggtgccgacagttcatcacggaagaaagaactcacagagccgggatcgctaactaatagaatagtactactaactaatactaatatatagataactaatactaatatatagatattaatactaatatatagatatatagaaatagatatctagaaatagaaacgaactaatatatagataatcgaaattgaaaagaactgtcttttctgtatactttccccgttctattgctaccgcgggtcttatgcaatcgatcggatcatat

SEQ ID NO: 463135 - DNA, 649 bp, Sorghum bicolor
  unsure (1)..(649): unsure at all n locations
gtagttcatcaaatctacttagtctagnataagtagataaatgtctagagtaagtagataaatctctaacacttctttttcttttaaaaataaaaagggttcaaatctctggttcttttctttatggtatagaaagaggtgagattaggtgcccttttcttcattttgcatttcttattaattttgtatgccgctattccgaagaatattttttttattcttgcttatcctactttcctagttgttctaagtaatatgcgcggtacaaagttcgtggtaggaacttctttgagtcattgtatttttctgttcatacgaaggaaacaaatatgtgattttccaaattggaaaatcgaaatgaagccctttttgttcagtctatctggacctttttgtataataggaattaattagaatattatattctaagtatttcgtttcgtctaggaacagaacctcaaaatattcctttactttaataaaatctggaattgtgttgtataagtgaacatgaatttattatcactcaatgagcatcttgtatttcatagaaattgggggttatatagtccttacgtaagggccagcctatccaactttcaggcattaagatacgtttaagacgtggatgattatcataagaaattcc

SEQ ID NO: 463136 - DNA, 642 bp, Sorghum bicolor
  unsure (1)..(642): unsure at all n locations
tacagtagttcatcatactaagncgaaaaactatagaataaaaatagaattagtcccatctcattatggaccgaaggggctggtatttttccaagaaatctctagccaaccttcccccaagaggtttttcttaacaccaatgaattatattaatgctagaggaaaacgatagctccaagaatttctttgttctcaacgcctcctatttagaggaattagccacttcaacgacctttgatggttataagggtatccaaagtacaaacctgatggttgtttgttatcccaaccattcttcccaaccctgataccaatcaggaaagggctaatttctaacaaagtttttctcttgttgattcctatttcgtggtgtagtgcttttctcccctatgctgcctattggtactagtagagtcggattggcctgtaatacagaacctatcctgtaggtgtaacctttcgctcaatactcaaatctacaattgaagcatctgaggccacatcaatcgaggatacacgacagaaggaattgttagttcacctcaccttccccaacgcgggtttcctttactaattttgttctctctatgcgaaccctctctatttctcgtaagaatgagatataggtagggctaaaataaa

SEQ ID NO: 463137 - DNA, 638 bp, Sorghum bicolor
  unsure (1)..(638): unsure at all n locations
atgctcaaatcagcccttcttggnggttcctaaagggtattgtnnctgtcccgnataaatacnnaaaatttccggnaataatatnaaaaaataaataatattataaataggagtaaagtattgatatacttagaattacataagcaaataccaatgtactaaaaaaagaaaaagtatctaatctaaaggactcattttcttttttaggattaaacaaaagggttcgcaaataaaagcgctagtgccacaaccagtccataaattgttaaagcttccataaaagctagactaagcaataaagtacctcttattttaccttctgcttctggctgtctcgcaataccttctacagcttgtcctgcagcagtaccttgaccaactccgggcccaatagaagcaagccctacggccaatccagcagcaataacggaagcagcagcaattagtggattcatggtgagttcctcgtgtcaaaaaaaaaagaaatggttaaggatacaatcaaccaagaaattattacttccaacttctaagctctatcgggtagaagtaactaataagtacaaataaatgataatcgaaatcgttcgaattacttcgagatctcgtttttagtttctaatcattagaggtttgtg

SEQ ID NO: 463138 - DNA, 648 bp, Sorghum bicolor
cagtagttcatcacaccaccaatagtgtttggacaaaagtttttccgtcatcccttttgggactcacataataccttggatagtaccacaatctcttctacgcacaataatatgttgaactacttcaacaagtctacgtgtaagatagccagcatccgctgttcgtacagcagtatctacaaccccttttcgggctccgtagcagggaaattatatattctgtcaaagaaagtccctcgcgtaaattgctttgaataggtaaatcaatcatttgtccttgaggatccgccattaaccctctcatacctactaattggtgtacctgagatgcatttcctctggctcctgaaaaagacattagatagactggattagaaggatccgttattcgaaaattcgaattcatttcttgtttcaaatattcacttgtagcataccatatctcaacggattggcgtaatttttctaccgcgtgtacagctccataataatagtgtttctccaaaagaaaactctgttgttccgcgtcttggactaaccatcctttagagggtattgttaaaagatcctcgattcctaaagaaatcgatgtagtagtggcttgatggaagcccagagtctttatttgatccagtatatgggaggtat

SEQ ID NO: 463139 - DNA, 512 bp, Sorghum bicolor
  unsure (1)..(512): unsure at all n locations
ctctctgnaaatacgtcgtatacttccacatattatgggtaacgtaggagcacatccctattttcacccggggttcttaattaccactgcttagctttcaattcgcctctgaccatcaaattaaatgtgaataacccgtcctcctctctttgaaacaggggcgcttccggttctgtgcgtgcttcaaacaattttgtcttgtccatattaccatatctctagagtcaataattttctatgaggaactactgaactcaatcacttgctgccgttactcaacagttttctgttgaggtctatcccgtagtggttgtctaattggatcagtgatcgatttctaggtttcgtcgttaaccttcttggttgcttccccttacgtttctcagttgttcataccgctctcaaaggttgggcatttcccattgatataggaacttttgttcctgaatcttttgttttctccaattttcgcccctctgggatgtcctttatatctttttctcactctcccc

SEQ ID NO: 463140 - DNA, 601 bp, Sorghum bicolor
tactactcaagctgctttatatactcatcaccaatacattgcagggttcatcatgacaggggcttttgctcatggagctatttttttcattagggattacaatccggaacagaatgaagataatgtattggcaagaatgttagaccataaggaagctatcatatctcatttaagttgggctagcctcttcctaggattccataccttgggcctttatgttcataacgacgttatgcttgcttttggtactccagaaaagcaaatcttgatcgaacctatatttgcccaatggatacaatctgctcatggtaagacgacatatgggttcgatatactcttatcttcaacgaatggccccgctttcaatgcaggtcgaaacatatggttaccgggatggttgaatgctgttaatgagaatagtaattcgcttttcttaacaataggacctggggatttcttggttcatcatgctattgctctaggtttgcatacaactacattgattttagtaaagggtgctttagatgcacgcggttccaaattaatgccggataaaaaggatttcgggtatagttttccttgcgatggcccaaggcgcggc

SEQ ID NO: 463141 - DNA, 597 bp, Sorghum bicolor
  unsure (1)..(597): unsure at all n locations
gattgagttttgtataagaagacctttgcgttttggatttggatctttttcgtatttcaaaatagtngaaaaagtaaaataagaggtgttaagctttttatcattctggcatcgagctattttgccgcaggacctcccctacagtatcgtcaccgcagtagagtttaaccaccaaattcgggatggattggtgtggttcctctacgcctaggacaccagaatatcgaaccatgaacgagaaaggcatgagagaaatattggctagtaattgtgaagccccaattcttaactggaagggacaccaaaggactctgccctccctctctatttatccaagagatggaagggcagagcttttttttggttttttcatcttttcttttcatcaaagagttgaacaatgaagatagatggcaagtgcctgatcgatttgatcaggtcgtgtaggaacaaggttcaaatcgttcgttcgttaggatgcctcagctgcatacatcactgcacttccacttgacacctatttaaacggctcgtctcgccgctaccttatcctatttccatacttctgtcgctccatccccgtatgggtggagaacc

SEQ ID NO: 463142 - DNA, 622 bp, Sorghum bicolor
  unsure (1)..(622): unsure at all n locations
tccaagcccatactgataaactattcatcccaaaagnttatatccattaataagttgtgaagagtttaaccataggtaatctcttaaccatcccatcaaataagtggaggattcattaaattgtgaaacgttgccctgccataatgtaatgtgtttccaatgccaataaaaagtaacccatccgatggtatttaacatccagaaaacagccaaataaaacgcgtcccaagcagaaatatcacaagtaccgccgcgccctgggccatcgcaaggaaaactatacccgaaatcctttttatccggcattaatttggaaccgcgtgcatctaaagcaccctttactaaaatcaatgtagttgtatgcaaacctagagcaatagcatgatgaaccaagaaatccccaggtcctattgttaagaaaagcgaattactattctcattaacagcattcaaccatcccggtaaccatatgtttcgacctgcattgaaagcggggccattcgttgaagataagagtatatcgaacccatatgtcgtcttaccatgagcagattgtatccattgggcaaatataggttcgatcaagatttgcttttctggagtaccaaaagcaagcataacg

SEQ ID NO: 463143 - DNA, 639 bp, Sorghum bicolor
tacagtagttcatcaatttaggcagttcatatcatcccatacatagtgttttgatctaagatgcaattcttcctgtttccgcagtagcatattgttccatggagctagggtccaaaataggaatcaacaagtgtttccacgactctaccgcccggccaatcctgttccactgaatcccctccctttttcatggccacatatctttacggctaaggagtgggaaatctttctcctgttacacaaatgaaatgtttcatttcatccgggaaaagccacctctttctccacaaacaatgtctttgtcatttgatccaggagccttccgttagataggaacagctttgctaaatactgagaactctcggatagagtattagaatgaaaagaccattaattatataaggaagaacccagggttctagcccattcccattcctaaatcactaattcgtagtgcttttgcctttcttgcgtactcctgatgaaccagttgctagccatatgtttaggaggcttttttctccaggtactggtactaagccgctttgccatctcttcatcttcatctgcaaagaattctcgacgtgaaaacacagagaccaaaggcctgatctttgaataggaaaaagaatggatccg

SEQ ID NO: 463144 - DNA, 646 bp, Sorghum bicolor
  unsure (1)..(646): unsure at all n locations
tacagtagttcatcatccgttttattaagttttttagttatccctttgggatatcgttttgttttagctgatcttagtattggtgtttttttatggattgcgatttcaagtattgctcctattggtcttctcatggcaggatatagctcaaataataaatattctttttcaggcggtctacgagcggctgctcaatctattagttatgaaataccattaactttttgtgtactagcaatatctctacgtgtgattcgttaaaataggatctttttcctctaaaatacattgaatgcttatcttcctttgcttattctgtattcgcgttggtaagttaaactcgatagctatatgagtgaaacaaaacagcttattaatttgtagtaaaaataaaaaatctcatttcctacgtacaagaaaaaagttaaagtaaacataagcagtgtaaactctttaccccaaggttgagattgtttaattagtcatcatatcttgaagcgggcaagaataaaggattcgcgatatggaattccattactagaatattttgagttattactatnatttaaacttataaccataaggcaatccatcaaaagttagtgagggattaggaacactaaagtacatacaggattagtaatga

SEQ ID NO: 463145 - DNA, 84 bp, Sorghum bicolor
ttgttacgtctagctgcttttcttctagtactcaaggctctttattttggcggcgtgtatgatacctgggcccccggggggggg

SEQ ID NO: 463146 - DNA, 203 bp, Sorghum bicolor
  unsure (1)..(203): unsure at all n locations
agttcatcagccagggcctcactaacattaanaacttttctactggtggagtattcacagggggtactgccgaccttatacgatccccctcngaatggaaaaatccaattcaatgaggatttggttcaccccacacgtacccgtcatgggcagcctgcttttctatgctatatagacttgcnnatgtaactattcagagtcag

SEQ ID NO: 463147 - DNA, 642 bp, Sorghum bicolor
  unsure (1)..(642): unsure at all n locations
ttcatcaaatgtacatccagnaatanacctaagnaaacatgnatcccaggcggntacttgacatgttccccctcgcccaggtccgtcgcaagggaagcgaaagccaagatttgctttatcaggtatcagacgggaactgcgagcaaataaaacacctttcaaaagtattaatacagtcacatggatggtaaatgcgtgaatgtgatggactaaaaaatccgcggttcctaatggaataggtaacaaagctactttgccgcctacagctactaactcgccgcctccccacgttaagctggtacttgttgttgcaccaggagctgttacgccaggcgcgccagcatggatattttgtatccattgagcaaagatgggttgtaattgtatggcggtatccngaaaacatatcttggggacggcctaaagcactcatggtatcattatgaatgtacaagccaaaactgtgaaaacccagaaatatacatacccagttaaggtgggatatgattgcatcgcggtgtctaaggacgcgatctaatagatcgttgattcgagtagttggatcatagtctcttaccataaaaatggctgcatgtgcagcagcaccaactattagaaatccgccaatccacatgtggtgtg

SEQ ID NO: 463148 - DNA, 636 bp, Sorghum bicolor
  unsure (1)..(636): unsure at all n locations
tacagtagttcatcacgacgcggnaagttccgattgaaataggatctaaacaggnaagagcacttgccattcgttggttattagaagcatcccaaaagcgtccgggtcgaaatatggctttcaaattaagttccgaattagtagatgctgccaaagggagtgggggtgccatacgcaaaaaggaagcgactcatagaatggcagaggcaaatagagctcttgcacattttcgttaatccatgaacagaatctaggtatgtagacacatggatccatacatctcgatcggaaaagaatcaatagaaggagaatcggacgatatctttttcgaaacaaataaaaaggaaaaaaaaaaagagaaaacagaaatcatgatcaactaagccctctcgggggcttgcttaagaataagaaagaggaatcttatggaaatagcatggaataaggtttgatcctattcatggggattccgtaaatatcccattccaaaaatcgaaacaatcgggacttttcggagattggctgcagttactaattcatgatctggcatgtacagaatgaaaacttcattctcgattctacgagaatttttatgaaagcgtttcatttgcttttcttcaatggaagtttcatttt

SEQ ID NO: 463149 - DNA, 588 bp, Sorghum bicolor
ttagtagatccttttaggaggcccccatgacctagatcgaacctatcctatttttacagtgcgatggctggctgttcacggattagctgtacccacggtttttttcttgggatcaatatcagcaatgcagttcatccaacgataaaccaaattccaactatagaactatgacacaatcaaacccgaatgaacaaaatgttgaattgaatcgtaccagtctatactggggtttattactcatttttgtacttgctgttttattttccaattacttcttcaattgagagaaagaaagagagtagtaagaattctcttatcccatttggaaggataccatctttataactatccatgactgtttttgtctctagcatgaccacttgagaaaatgtggaggaaagtaggggaaatggccgatactactggaagaattcctctttggctgataggtactgtaactggtattcttgtgattggtttaataggtgttttcttttacggttcgtattctggattgggttcatctctatagtaatcggaggatccagattgtaaacatgaaaaagtaggaacttagcgggtccttac

SEQ ID NO: 463150 - DNA, 630 bp, Sorghum bicolor
gtagttcatcaatctaaaatcgatgaattacaccggacgctcctgtcaaaacattgattagcaagacatcaaaagaaagatttctaatccattaaaaacactcaaataccaaaatgaacagatccggttcaatttcactaaggctaagagcagccccaatcacaatggcaaaattgtgatttttttggcaatttttatttaaagaagtaaaataatcttgtatgagagtacatgcaagaggggcaaccctatcatttgaacgaagtgtagacagaaatacctaatatggagtgacaataaagagacccatctatctacaaattctatttgttcaatagacctttgtcaatggaaatacaatgtaattagatagaaaaaggaaataaaatagggacttttgttggattggcacgatataaatgcagcaaaaaaaaataggactaagaaagaggcaaattgtgtctaaataattaaggggtactaaggaccctctcctacttttttattcatttagttcttcaattaactcaaagttctttctttatctttaaagaattctgccttccttaaaatatcataaacagttcttgtaggttgagcacccttttcaaggaaatagagaatagctgg

SEQ ID NO: 463151 - DNA, 634 bp, Sorghum bicolor
  unsure (1)..(634): unsure at all n locations
ggtctaatgnaggctactatgaaaatttactcatgggtggggcaagctcttctattctggttcatggtttctcttggctatatggttcatctgggggggagatcgagcttcaagaaattgtgaatggtcttatcaatacacaaatgtataactccccaggaatttcaattgcgcttatattcatcactgtaggacttgggttcaagctttccccagccccttttcatcaatggactcctgacgtctacgaaggagtgtggttcgttcgacaaattcctacctctatctgaggtgtttgggttttgcaaaactccatagacatgcagaagagaaatgctatccccactccgaccaagacagaacttttaccaaaagtttattgtgatctttttgttcaaataacaattaaggtgaagcagggtcaggaacaacgaatctctttatgataaacagatccattttgcaagctcgttattacgggtagttcctacaaagaatcggactaatgacgtatacaatgcttgaattatcgatgtaaatgctacatagtgggttctcatccttcagagactacgagtgtaataggagcatccgttgacaaaaggatcaccctaagatgatcatctcatggcta

SEQ ID NO: 463152 - DNA, 601 bp, Sorghum bicolor
tacagtattctcacatccctcccccattgcctacgcgaccatattctaatccctatttccttttattgtcaatacttcgcggaaattttattaatttcgcgctcgaaggttgccattagtgtttctttaatttttggaagcaagggaaaaataatgcctaaattctaaacaaaagtagaagttcaaaacctaataaatttaattatctcttccattctatggccccgagaatgccaatattagcacgaatcgtacggaaatgtaactcggtattcaaacaactattcagagttcctagagctccttgtacagcttgttggaaaacccgttgtcggacctgattcatcgccctttgtttttcataaaaaagggtttcgtttttagacttttctaattgttccaaactaatagaagtagcattaatcaaattttctttttctcgttctatttcagagtatccattcattcgatactcatctgcttctagttcgactttctgtaatcgaatacgagctttttcgagttgttcaagggtccctctacgcaattcttccgaatttcgaatagtacttaagatcctctgttttcgattatctaataa

SEQ ID NO: 463153 - DNA, 599 bp, Sorghum bicolor
  unsure (1)..(599): unsure at all n locations
agttcatcatcttgtttttcttctttaacctaatnaacaaattttctacctcctttctttttcatgtatttttctgatcaggaaaataaaaaattatgtcagttatttttaagttattctaatctcgtacacacaaaaatttgcaattattcatctactgctggaatctggaatttggatttattttatcgatgcaaattggatttggatagaagggtacattcttttattttagatagaagaaacatttcttctatctaaaataaaagaattttgctgatttatttattgctatatccaatttatagaattgatataccatttaattgatatcatttagcaaaatgaaacacagcatatgcatccatctttgggctcgagaatttcacgggatagagatatagtataagaaataggctattaagtaactctaaatgaattgtggatacatctgtatccttaacatactgaaacgactgccattattcgtatcaaaccaatagcgattcataaaagctaaatcttgtaatcaatggtgtgccaataatgaatttttttgcatatgttttaagacgcttggtctgatttcgaaattgtcc

SEQ ID NO: 463154 - DNA, 630 bp, Sorghum bicolor
  unsure (1)..(630): unsure at all n locations
tcatattctcatttattctttttctttactatagaaagaataaagaaagaataaagaataaacatttgaattcagcattattccatgatttctatttcaaagcctattttttaaggggaaaacccctcttttctcattcgctctctattgcatgggtggaagaacaaaaatagaataggattctgaaaaaaaagaagntattgaaaagaaaaattgacttttgaaaccctttattcattatgtgtaacgngaaaagagttgcgatttcttcttattcctatagaacgtctagtaacaagaatatgaaatcgtaaatagcgaaaaattcttgccttgcgcgatctaagtctaaggaaataaaaaaatgcgcttatacaccaatttcatccacatcgaatttatatatcagaatagcggatagaggtatcattcaaggggtcaggtctacttactttatctttctttccaattttattgtgggtttgataagaaccttttttgctttgtggataaaaaaagagttttttttataacccgcttgttttattctaacaaattctatatggaactgcccgctgaagagaaaatcgatctgattgtctctcagcctttatcgaattttggaaagaa

SEQ ID NO: 463155 - DNA, 319 bp, Sorghum bicolor
  unsure (1)..(319): unsure at all n locations
cccggcggtctggnaaaaagcagtaatcaataggacttccctaagtcctcccttcctgaaaggaagaacgtgaaattctttttcctttctgcngggaccaggagattggatctagccatagtaggaatgcttggtctaaataagccacttcttggtcttcgtccccctaagtcacttcgggcgcgggcggtctgtgctttgggttgtggctctttatctctctcttggctcgttctgggcgctgagctggtttgtctttggctcttagtgtgtcttgggttgggcccggcgggtctctttcccccttcttttttctgcc

SEQ ID NO: 463156 - DNA, 589 bp, Sorghum bicolor
cttgaaaataaactattcgttcggttgcagaactgttacaagatcaattcggactggctcttggccgtttacaacatgcggttcaaaaaactatccgtagagtattcatacgtcaatcgaaaccgactccacaaactttggtaactccaacttcaacttcgattttattaatcactacttatgagaccttttttggcacataccccttagctcaagtttttgatcaaaccaatccattgacacaaacggttcatgggcgaaaagtgagttgtttgggtcctggaggattgacggggagaactgcaagttttcgtagccgagatattcatccgagtcactatgggcgtatttgtccaattgacacgtccgaaggaatcaatgttggacttaccggatcgttagctattcatgcgagaattgatcactggtggggatctatagagagtccgttttatgaaatatctgagaaagcaaaagaaaaaaaagagagacaggtagtttatttatcaccaaatagagatgaatattatatgatagcagcaggaaattctttgtccttgaatcagggtattcaggaagaacaggttgt

SEQ ID NO: 463157 - DNA, 629 bp, Sorghum bicolor
tagttcatcaatttccaccaatttcaagtccttattatgattccttttatgagaaaatgtctaatgatttagattctctcattactaatcctgtatgtactttagtgttcctaatccctcactaacttttgatggattgccttatggttataagtttaaattatagtaataactcaaaatattctagtaatggaattccatatcgcgaatcctttattcttgcccgcttcaagatatgatgactaattaaacaatctcaaccttggggtaaagagtttacactgcttatgtttactttaacttttttcttgtacgtaggaaatgagattttttatttttactacaaattaataagctgttttgtttcactcatatagctatcgagtttaacttaccaacgcgaatacagaataagcaaaggaagataagcattcaatgtattttagaggaaaaagatcctattttaacgaatcacacgtagagatattgctagtacacaaaaagttaatggtatttcataactaatagattgagcagccgctcgtagaccgcctgaaaaagaaatttattatttgagctatatcctgccatgagaagaccaataggagcaatacttggaaatcgcaatc

SEQ ID NO: 463158 - DNA, 609 bp, Sorghum bicolor
  unsure (1)..(609): unsure at all n locations
accattgnaaaaagaaatggatttcgggggaattttggataaaagaaaaaaagaattaatttgaaaaaaaaatctttctatttcggattatttcttttttaataggatggatttcatcctctttttggagcaaacggtcgaatattcccctattccttcttattttaactcattgtattccatatggaataagaggagaagaaaagcattccacgacccccaagggccccctcaaaaagggaactattccttgaatttacttttttttttatttttattcgttttttgaaccccaacaaaagttgattcgaagttacttcaattatccttttcttttaagttcttcttgtaaagttccatgcttgctgtttggtcaagaaagttagacctaatccaacaaacaagacaaggattgattacgaatcttgattcttcaaagaatgtattccgtttctttcataacggattatccactattcgattttctatttattagatattattttatgctaaccaattaaattcctttaactaaaaagggatagattttgcatatacttatctttgtattgcgtcaatatgagaatatccttcctaaattctttatct

SEQ ID NO: 463159 - DNA, 385 bp, Sorghum bicolor
  unsure (1)..(385): unsure at all n locations
tagttcatcacnaaatagcttgaaataaataataattgttccgatggnaaccttctactcataattgaccattgatacacggtataaacatagccttaatgaattaactgacttcttttacttattcaaatacaattcaaatacaattcaaattcaaatacaaaatcgaaaatcagacctgttagcattctaaggtcaaaagtatagtttaaatttaagtaaaaaaaaattgctttatgtatacttaaatcgtataaataggggtaaacggggtctctgatgtttcatagaaattgtttgttacgtcagaatcagaagaaactaattctgtntggaganacaaaatctctctcatttccgacgcgaattgcttttgtcttttctt

SEQ ID NO: 463160 - DNA, 455 bp, Sorghum bicolor
  unsure (1)..(455): unsure at all n locations
agtagttcaacaatcattctagtacaactattgcagtagnaatgacaacagactcgtgtatagggaactagattagcttagctacctatctaatttattgtagaaattccgggatccgcgattggacatggaaaatagaaaaactttttcttggttaaaggaacagatgattcgatcgatttctgtatcgatcatgatatacgtaataactcgcacatctatttcaaacgcatatcccatttttgcgcagcagggttatgaaaacccgcgggaagcaactggacgaattgtatgtgccaattgccatttagctaataagcctgtagatattgaagttccccaagcagtgcttcctgatactgtatttgaagcagttcttcgaattccttatgatatgcagctgaaacaagttcttgctaatggtaaaaagggagggttgaatgtgggtgctgttc

SEQ ID NO: 463161 - DNA, 495 bp, Sorghum bicolor
  unsure (1)..(495): unsure at all n locations
ttcagnaaaaaaaaaaaaaagaggaaaagatccattgagacaattatgagtttgattgagtttccgttactcgaccaaacaagttctaattccgttatttcaactacaccaaacgatctttcgaattggtcaagactctcaagtttatggccccttctatatggtaccagttgttgtttcattgaatttgcctcattaataggctcgcgattcgactttgatcgttatggattggtaccaagatcaagtcctagacaagcggacctaattttaacagctggtacggtaacaatgaaaatggctccatctttagtgcgattatatgagcaaatgcctgaaccgaaatacgtcattgctatgggagcctgtactattacagggggcatgttcagtacagattcctatagtactgttcgaggagttgataagttaattcctgtggacgtctacctgccgggttgcccgcctaaaccagagctgttatagatgccctaa

SEQ ID NO: 463162 - DNA, 506 bp, Sorghum bicolor
  unsure (1)..(506): unsure at all n locations
agctatatgnaaagatctactaactcatctcaggatgcagtccactttcaatatatctctgtatactgtatacacgggtacanaatccgcttatccgtttgtgaaaaaagctaaacccctccctcactccattccaataaaacggtaaggaaaagttttaataaaaagaagaatcaatggattcatgattaaacccctcctacttcttgtattttcgtacaattttgattaagtgagggatcaaatagaaattgtagtcaactttatttgaaggtagtttggaggatcataaatatgactattgctttccaattagctgtttttgcattaattgcgacttcctcagttttagtaattagtgtaccccttgtatttgcttctcctgatggttggtcaaataataaaaacgttgtattttccggtacatcattatggattggattagtctttctggtagctattctgaattctcttatttcttgaatttgtttagtatttagtaaccc

SEQ ID NO: 463163 - DNA, 627 bp, Sorghum bicolor
  unsure (1)..(627): unsure at all n locations
agttcatcagggagnaaacatctttcccaattctttgttcaattctgacaaaaaaaaaggaagaagggaggggattgtactgcctttatatctcttagtatatattgtaggaataattaaacgattccagacaacagtctggcacatttacgtccttacaaataatgatccttgtagtcataaccgtagaatagatcctaatcgaaatgcatacatttggttcatacgctattggtatggtaagaagagatgtattttacagactagagaggggctatctaaatcctaaagtaaagacccgcgattgaagtaccaatcgcccaccgccatgaactttctcctttgattcgataaggtggaattagcctccttctcgaatggctacccttgacaaagggtagcattggtatcataatctacatgtagcgggtatagtttagtggtaaaagtgtgattcgttctattaataactgaatttgaaatgatatacttaaggcatccttaagtttttttatattcatattccgatgaaaactttagttcttataaagggtttaatccttttcctctcaatagcatattgaggaagaatatacattctcgcgattagtatccaaagactaattg

SEQ ID NO: 463164 - DNA, 605 bp, Sorghum bicolor
  unsure (1)..(605): unsure at all n locations
cgcctttcagaaaagaatatctccgnaaaagatttgagttctgtatggcttttttttctcttcactcggaccaatccacctagtcgacttcttgtattttttgtgagttgtgtatcgactccaataatactattgtcaagtacctttagggatgaggatctcggcaagatatgcagttcttgaagaatgaaaaaaaaccgatctacttctttttggtattttagactaaattcttttgttcctcgatgctcaataaaaccctctttttttaagatagaatcttcctccgggctcccatattcgtcttctgagtcttcctctgagtcttcctctgagtcttcttctaaagtcccatattccttctctgagccatcttcagagctcccatattcttcttctgagtcttcctctaggatttcatattcgccctctccctctcgggtcctatatttgttctctaggctcccatattcttcctctgagtctttctctacagtcctatattcgtcctctaggatcccatactcatcttctagggtttcataattcgtcctctaaagtcctatattcgtcttctaggatttcatattcgccctctccctata

SEQ ID NO: 463165 - DNA, 620 bp, Sorghum bicolor
ttcatcatactttacaaaaaaaattctttcttttgttattcgagtcgaagaatatgagaattttataactacccaaaacgaccaatcttttcattggcatagcttatttgtttaatagcttatttgtttaatagttaattgtttttgttacgagaaaaatctattaattcattaaattaattccgctttttttgaggttgatagtttatttgttgggaaagggtcgatccttctcatttcaggattgatcatcttgagttctctgttgagaatggaaattcaataataaaaataaagaagtcttaagtaaactcttttattcctctttttcgaactatgtttcattcatatgatagaaagaatatgggtttaaataaattgtatctttgcagagtgttccccgataaatacttatttcttttatccaattttctccatagatagcaggtttgaattagtatacaaaagcaatgactattcatgtattccatccatattggatcaattctcgataccattttgcaatgaaattagaggaatgttatggtaaaacttcgtttaaaacgatgtggtagaaagcaacgtgcgactttgaagacatgatcgattgtggattttgc

SEQ ID NO: 463166 - DNA, 645 bp, Sorghum bicolor
tacagtagttcatcatgtggtactatccaagtatttctgtgagtcctcaaaatgggatgacggaaaactttttgtccaaacactaattggtcgtgtattagcagacgatatatatattggttcacgatgcattgcttctcgaaatcaagatattggaattggattagtcaatcgattcataactgcctttcgagcacaaccgtttcgagcacaaccaatatatattagaaccccctttacttgccggagcacatcttggatctgtcaattatgttatgggcggagtcccactcatggggatctggtcgaattgggggaagctgtaggtattattgcgggtcaatcaattggggagccagggactcaactaacattaagaacttttcatactggtggagtattcacagggggtactgccgaccttatacgatccccctcgaatggaaaaatccaattcaatgaggatttggttcaccccacacgtacccgtcatgggcagcctgcttttctatgctatatagacttgcatgtaactattcagagtcaggatattctacatagtgtgaatattccgttaaaaagcttgattctagtgcaaaatgatcaatatgttagaatctgaacaagtaattgcggagattcgtg

SEQ ID NO: 463167 - DNA, 620 bp, Sorghum bicolor
  unsure (1)..(620): unsure at all n locations
tacagtagttcatcattttgnaataaaaaaaanaggaatttgctctgatatagattatagcctggccttcttggcccacctaagtgcaattacngataaaagaaaggatatgtagataggtggataactagattggcaagtattttaaaaataaagtactttatctttattttaggattctacaacgaaatcctttattttctagcaattctactactacgaaacaaaaaagacccttcaaattctttttgaaaaagaaactaagcgtgctattctaaatcgaactgaagtcaaactttctagtgcttataaattattatggctttatccctttcatagaaaggagataaaacgagaaatctttgctatccaatctttttagaatatcataaagtttaagtggcataatttttttctaggactgttttatcaattcatttttattccatttcgacccctgcgaaattcgaactttcgtcgaaatcgtctctattcatatgtatgaaatacatatatgaaatacgtatgtggagttccctagaatttcatgtgattcagtaaacagaatatggattccatgattgctagattgatccgtaaggattgatgaagagtgagct

SEQ ID NO: 463168 - DNA, 623 bp, Sorghum bicolor
tagttcatcactttttctgcacaaaaaaacccctcctaattcactaatttgtaggaagatctgaacttttggatttgaaaaagtttcagaagatatatctaaagtagatggtgattgatagagcaattcttgttcgtaagttccagtgtgagtactgcgccgaacataaagtttgtgacgggtagtaaaagatctatttttcttttgactttgacatagagttcgatcctcaattatttctcgcgctatcttcttacgaagttttgttagggcatctataacagcctctggtttaggcgggcaacccggcaggtagacgtccacaggaattaacttatcaactcctcgaacagtactataggaatctgtactgaacatgccccctgtaatagtacaggctcccatagcaatgacgtatttcggttcaggcatttgctcatataatcgcactaaagatggagccattttcattgttaccgtaccagctgttaaaattaggtccgcttgtctaggacttgatcttggtaccaatccataacgatcaaagtcgaatcgcgagcctattaatgaggcaaattcaatgaaacaacaactggtaccatatagaaggggccataaacttg

SEQ ID NO: 463169 - DNA, 651 bp, Sorghum bicolor
  unsure (1)..(651): unsure at all n locations
gtacagtagttcaacatnnccaaagataccttaccggnattcccggnanatgaanaagcgacttgggttgacttatacaatgttatgtatcgagaaagacactttttttaggtcaagagattcgttgcgagatcacgaatcatattacaggtctgatggtatatctcagtatagaagatggaaatagcgatatttttttgtttataaactcccctggcgggtggctaatctcaggaatggcgatttttgatacgatgcaaacggtgacacctgatatatatacaatatgcctcggaatagccgcgtccatggcctccttcattctgcttggaggagaacccaccaagcgtatagcattccctcacgctaggattatgcttcaccaacctgctagtgcttattatcgggcaaggacaccagaatttttactagaagtggaagagttacacaaagttcgcgaaatgatcacaagggtttatgcactaagaacaggcaagcctttttgggttgtatccgaagacatggaaagggatgtttttatgtcagcagacgaagccaaagcttatggacttgtcgatattgtaggggatgaaatgattgacgagcactgcgatactgatccagtgtggtttccagaaatgtttaaggatt

SEQ ID NO: 463170 - DNA, 455 bp, Sorghum bicolor
tccttgtataatttaatccatcttttagttttttttgaacattgaattcattattcgacgtagtctagcaactcatctttatttgagacaccccgctcgcttattgcaattcagaattgaattgattttatcggggatatatttgcaattcaatcggaatgaatatatccaaaagtttttctctctcccgcctccctccttccttttttagagtattccaaatcatactataacgcttgatattcattctttttttctaagctgaattagaaatttcatttgctatgattctatcttctgcttagtgaactatttatccttaaattattaacaaagtaaaaaaacagatatctcaaaaatgtatataatgatcaaatgaaaatgccaatctcttggcattttctcttttatatattatgcatatatagtcttcttttctatgtattagattattc

SEQ ID NO: 463171 - DNA, 663 bp, Sorghum bicolor
  unsure (1)..(663): unsure at all n locations
ttttgcctaaagtagtacagtagttatcaagggtgttttacgtanaaaactatttttgcttattttgcgatccacgaacagaaaagaaaaagggttcaggaattgttaaatttagatataggaccctagaggaagaatatcggacccgagaggaagagtataggactcgagaggaagactcagaagacgaatatgagagcccagagaacaaatataggacccgagagggagagggcgaatatgaaatcctagaagacgaatataggactctagaggacgaatatgaaaccctagaagatgagtatgggatcctagaggacgaatataggactctagagaaagactcagaggaagaatatgggagcctagagaacaaatataggacccgagagggagagggcgaatatgaaatcctagaggaagactcagaagaagaatatgggagctctgaagatggctcagagaaggaatatgggactttagaagaagactcagaggaagactcagaggaagactcagaagacgaatatgggagcccggaggaagattctatcttaaaaaaagagggttttattgagcatcgaggaacaaaagaatttagtctaaaataccaaaaagaagtagatcggttttttttcattcttcaagaactgcatatcttgc

SEQ ID NO: 463172 - DNA, 651 bp, Sorghum bicolor
tacagtagttcatcactttcttatcttatccaatttcccttcctttttcttatagttatacatacaattatgtatgtattatatgaccaactttctatgggtcacatagacatcccaataagcagtagaagtagaaatgagatggagaaaagaggatcttaaataaaaaggatcccatattttaatttaggaaaaagagcgtttgcttggtttttattttattaggttactatcaatatacgctttttggggtctaaagatgagagcaaatccataaaagaaggagtcggcaaatggagtgagaatgaggtggattctttccaattattcattgaacatacacaaacaaagttggaactagaaaatggcaggggtgcggtttaaccccaaaaaagtaactaattagatgaaattcattctctaacaataaacgaatacggtttatgtatggattccggtaaaataccggtactcgatttcataagagtcgaataggaagttaagatgagggtggtataatcataaaaatagagtagtatcctaaattatactaaattcacgtatgatatgtatgcctttccttatccaccggaagtagtgaaaaaaaaattctatactgcactgctctctttttactgagaaatgcaaaaa

SEQ ID NO: 463173 - DNA, 599 bp, Sorghum bicolor
ttcatcaccacatgaaggggtgatctcgtagttcttggtctgtgaagagcgttgttaggtgctccattttcccattgaggacgaacctcaacctgtgctcgagagatagctctccatacactgataagggatgtatggattctcgagaagagaggagccgcggtggccccccccccggaccgcccggatcccacgagtgaatagaaagttcgatctacatgggatctcacctgaatcgccccatctatcctcctgaggagaagtttgtttggtttcaaactccgattcaaacaggaggagtacgccatgctaatgtgccttggatgatccacatcttcgggtcaggcgctgatgagcacattgaactatccatgtggctgagagccctcacagcccaggcacaacgacgcaattatcaggggcgcgctctaccactgagctaatagcccgtcgcgcgggcctcccaaagggaggcctgctacgccaaaagcgagaaaaactccatccctttccttttgacatccccatgccgccacacggtgggacatggggacgtcaaaaaggagatcctatcactatcaactaatttgttccgacct
